(19) United States
(12) Patent Application Publication
(10) Pub. No.: US 2026/0210939 A1
(43) Pub. Date: Jul. 23, 2026

(54) MODIFIED OLFACTORY RECEPTORS

(71) Applicant: GIVAUDAN SA, VERNIER (CH)

(72) Inventors: Roger EMTER, Kemptthal (CH); Andreas NATSCH, Kemptthal (CH)

(21) Appl. No.: 19/139,040

(22) PCT Filed: Dec. 15, 2023
(86) PCT No.: PCT/EP2023/086135

§ 371 Date: Jun. 13, 2025

(30) Foreign Application Priority Data
Dec. 15, 2022 (EP) 22213916.4
Sep. 25, 2023 (EP) 23199452.6

(51) Int. Cl. G01N 33/50; C07K 14/705

(52) U.S. Cl. CPC G01N 33/5008; C07K 14/705

(57) ABSTRACT

Described herein are olfactory receptor proteins having a modified C-terminal domain comprising a specific amino acid sequence motif, as well as related nucleic acid molecules, expression vectors, recombinant host cells, libraries, and methods and uses.

### FIELD

[0001] Aspects and embodiments described herein relate to the fields of biotechnology and flavours and fragrances, in particular to modified olfactory receptors and to related nucleic acid molecules, expression vectors, recombinant host cells, libraries, and methods and uses for expressing olfactory receptors and for identifying novel olfactory receptors and novel olfactory receptor ligands, enhancers and antagonists.

### BACKGROUND

[0002] Olfactory or odorant receptors (ORs) are expressed in olfactory sensory neurons of the olfactory epithelium and are responsible for the detection of odorants. Olfactory receptors belong to the G protein-coupled receptor superfamily (GPCRs). Activation of an OR by an odorant (ligand) activates the olfactory-specific G protein which in turn promotes the production of cyclic AMP (cAMP) via a type III adenylate cyclase. The increased levels of intracellular cAMP results in the opening of cyclic nucleotide-gated ion channels which allow calcium ions to enter into the cell, depolarizing the olfactory sensory neuron and triggering an action potential which carries the information to the glomeruli of the olfactory bulb.

[0003] The human genome encodes approximately 400 different functional olfactory receptors. A specific olfactory receptor may be activated by more than one ligand molecule and a specific ligand molecule may activate multiple olfactory receptors, which creates a highly complex interaction network between the OR and ligand repertoires. Elucidation of said interactions can allow for the discovery of novel flavour and fragrance ingredients, or compounds such as odor enhancers that are more sustainable and/or easier to produce than currently used compounds. For many of the approximately 400 different olfactory receptor genes, different variants called alleles or haplotypes exist in the human populations. The protein products of different alleles or haplotypes of the same gene may have different ligand selectivity or sensitivity.

[0004] Next to their expression in olfactory sensory neurons of the olfactory epithelium, OR expression was also found in many other cells and tissues (Feldmesser et al. Widespread ectopic expression of olfactory receptor genes. BMC Genomics 2006; 7: p. 121; Massberg, D. and H. Hatt. Human Olfactory Receptors: Novel Cellular Functions Outside of the Nose. Physiol Rev 2018; 98(3):1739-1763). These ORs have been found to be associated with many important diseases and therefore ORs—next to their primary interest as targets for odorant ligands—have also an important interest as targets to find agonists and antagonists to treat various diseases (Lee et al. Therapeutic potential of ectopic olfactory and taste receptors. Nature Reviews Drug Discovery 2019; 18(2):116-138). Particularly, OR signalling has been associated with reduced or increased cell proliferation in bladder, colon, prostate, lung and liver cancer cells. Similarly, OR expression in inflammatory cells was associated with regulation of inflammation. Thus, OR screening has multiple applications beyond olfaction.

[0005] Efficient screening of olfactory receptors requires their expression in cultured cell lines, which generally involves the introduction of an olfactory receptor gene into a cell followed by its stable or transient overexpression. In general, it has proven very difficult to functionally express olfactory receptors in host cells, as it proved difficult to obtain correct folding of the receptors and/or correct insertion of the receptors into the cell membrane. Thus, several approaches have been tried to improve functional heterologous expression of olfactory receptors.

[0006] Functional heterologous olfactory receptor expression utilizing the expression systems currently available in the art generally requires co-expression of accessory proteins of the receptor transporting protein (RTP) family, such as RTP1 S and RTP2 (Yu et al. Receptor-transporting protein (RTP) family members play divergent roles in the functional expression of odorant receptors. PLoS One 2017; 12(6):e0179067), which are normally expressed in the olfactory sensory neurons and facilitate OR trafficking to the cell-surface membrane. Furthermore, it was found that a fusion of the olfactory receptor gene with a sequence encoding the N-terminal sequence (initiation methionine and 19 following amino acids) of rhodopsin (=rho-tag) facilitates expression of olfactory receptors (Krautwurst et al. Identification of ligands for olfactory receptors by functional expression of a receptor library. Cell. 1998; 95(7):917-26).

[0007] However, even when using RTP proteins and an N-terminal rho-Tag, more than half of the known olfactory receptors cannot be functionally expressed utilizing currently available nucleic acid constructs, cell lines, and methods, resulting in a presently limited coverage of the available receptor-ligand space, with multiple receptors not having identified ligands (orphan receptors), and limited industrial application of said methods. Even for receptors expressed with said methods, the expression may be low, leading to screening assays with low sensitivity. Indeed, many of those receptors that are functionally expressed in current expression systems are only strongly activated at relatively high ligand concentrations, e.g. at 10-300 μM, whereby many ligands already trigger a sensory experience in vivo at much lower concentrations. Thus, the receptors as expressed in current systems are often not activated at physiologically relevant concentrations. This indicates that the current systems often are not sufficiently sensitive to mimic the situation in vivo. This also leads to practical issues, as (weak) ligands which are cytotoxic or poorly soluble in cell culture media cannot trigger receptor activation in the current screening cell lines, because they are not sufficiently dissolved (most odorants are apolar molecules with limited solubility in water) or directly lead to inactivation of the cell lines by cytotoxicity at the high test concentrations applied.

[0008] Classical OR screening assays rely on approaches wherein a clonal population of cells generally receives a DNA expression construct coding for one specific receptor and/or accessory molecule at a time and is then tested for functional activation by various ligands. Said assays further generally involve the co-expression of a luciferase gene operably linked to a cAMP-inducible promoter (Saito et al. RTP family members induce functional expression of mammalian odorant receptors. Cell 2004; 119(5):679-691), which is used as a reporter gene. The activation of the olfactory receptor and subsequent increase in intracellular cAMP results in expression of luciferase. Oxidation of luciferin catalysed by luciferase results in the emission of light which can then be detected and quantified. Classical OR screening assays are limited in their sensitivity, may lead to highly different expression of different receptors, and are often not compatible with high-throughput screening and selection methods such as screening of libraries of volatile flavour and fragrance compounds including ligands of moderate activity, ligands with cytotoxic properties and ligands with limited solubility in cell culture media.

### SUMMARY

[0009] In view of all of the above, there is a need for improved olfactory receptors and related nucleic acid molecules, expression vectors, recombinant host cells, libraries, and methods and uses for expressing olfactory receptors and for identifying novel olfactory receptor ligands, enhancers and antagonists. More specifically, such improved olfactory receptors and related nucleic acid molecules, expression vectors, recombinant host cells, libraries, and methods and uses should enhance the sensitivity of the assay to allow testing at lower concentrations and thereby describing the full ligand spectrum of the OR also in respect to poorly soluble and cytotoxic ligands. Such improvements in sensitivity should also allow to identify novel ligand-OR pairs, both to de-orphanise receptors and to better describe the full receptive space (additional ligands but also antagonists and enhancers) of already de-orphanised receptors.

[0010] Additionally, for large-scale de-orphanisation of olfactory receptors (i.e. for the identification of a ligand for all receptors with hitherto no known ligand) and for finding all active OR and especially the most sensitive OR for a given ligand of interest, a whole library of many/all human olfactory receptors needs to be expressed. In order to find the truly most important receptor for a given ligand, all receptors should be expressed at a similar level, preferably at least to the maximum extent possible. Otherwise, false-positive responses are observed, whereby a strongly expressed receptor appears as the most sensitive receptor to the ligand of interest and the truly most sensitive receptor is missed due to a lower functional expression. Thus, for such screening campaigns on multiple receptors, it is desirable to normalize the functional expression of different receptors and minimize expression differences between receptors. Hence, there is a need for libraries of human ORs that are optimized in a way to give similar functional expression of all receptors to be used in OR expression assays.

[0011] The present invention provides olfactory receptors and related nucleic acid molecules, expression vectors, recombinant host cells, libraries, and methods and uses, which are particularly useful in the context of ORs that are difficult to express using conventional approaches or in the context of ORs which lead to assays with limited sensitivity using conventional approaches, and in the identification of novel cognate receptor-ligand pairs. The invention further provides olfactory receptor variants with improved functional expression allowing for more sensitive assays to detect OR-ligand interactions. Olfactory receptors and related nucleic acid molecules, expression vectors, recombinant host cells, libraries, and methods and uses described herein exhibit for example at least one of the following benefits in comparison with the prior art:
[0012] Improved functional heterologous expression
[0013] Allow deorphanisation of receptors for which no ligand is known
[0014] Enhance sensitivity of assays to determine the complete ligand spectrum of a receptor
[0015] Enhance sensitivity of assays to measure ligand binding at physiologically more relevant concentration
[0016] Enhance sensitivity of assays to identify antagonists and enhancers
[0017] Enablement of functional expression of olfactory receptors otherwise not possible using conventional approaches
[0018] Enablement of identification of novel cognate receptor-ligand pairs
[0019] Enhanced sensitivity of assays with olfactory receptors (as measured by reduced ligand concentration to obtain similar activity or reduced EC50 values; i.e. enhanced potency, significantly lower detection threshold or increased efficacy)
[0020] Ability to test more cytotoxic molecules
[0021] Ability to test poorly soluble molecules
[0022] Ability to detect ligands in complex test mixtures and unpurified synthetic samples
[0023] Ability to screen for a ligand with a particular odor description in complex test mixtures and unpurified synthetic samples
[0024] Ability to identify olfactive more active isomers or enantiomers in racemic mixtures; and biodegradable compounds and compositions
[0025] Allow generation of OR libraries having better and more uniform functional expression as compared to using wild-type OR genes
[0026] Increased olfactory receptor and ligand screening throughput capacity

[0027] As is demonstrated in the experimental section herein, the application of the olfactory receptors and related nucleic acid molecules, expression vectors, recombinant host cells, libraries, and methods and uses described herein is associated with several of the above-benefits and thus provides a highly significant improvement over conventional approaches. Accordingly, the aspects and embodiments of the present invention as described herein solve at least some of the problems and needs as discussed herein.

[0028] An aspect of the invention relates to an olfactory receptor protein, wherein said protein has a modified C-terminal domain comprising the amino acid sequence motif RN[KR][EDQ][VMIL][KR]xA[LIV][KRH][KR][LI][LIF][KRG][KR][KR] (SEQ ID NO: 1). In some embodiments, an olfactory receptor protein of the invention is such that the modified C-terminal domain is fused to the seventh transmembrane helix (TM7) of the protein. In some embodiments, an olfactory receptor protein of the invention is such that the protein is a class I or class II olfactory receptor with a modified C-terminal domain, preferably a human, dog or cat class I or class II olfactory receptor with a modified C-terminal domain, more preferably a human class I or class II olfactory receptor with a modified C-terminal domain. In some embodiments, an olfactory receptor protein of the invention is such that the class II receptor is selected from the group consisting of OR7C1, OR9Q2, OR8K3, OR10J5, OR1C1, OR7D4, OR2T4, OR5B12, OR7A17, OR10H5, OR5A1, OR5A2, OR1N2, OR2C1, OR2T11, OR2M2, OR4S2, OR2V1, OR5P3, OR6P1, OR2L2, OR10G7, OR5AN1, OR5V1, OR2L3, OR2AG2, OR7A5, OR7E24, OR7A10, OR10H2, OR10H1, OR10D3, OR1D2, OR2A5, OR2A25, OR11G2, OR14J1, OR5M3, OR8D1, OR10G3, OR10G9, OR2L5, OR8H1, OR10K1, OR11A1, OR2AK2, OR10A3, OR10A6, OR10J1, and OR2J2, preferably wherein the class II receptor is selected from the group consisting of OR7A17, OR7C1, OR2A25, OR7E24, OR10H1, OR10K1, OR2AG2, OR10H2, OR10H5, OR10D3, OR14J1, OR7A10, OR2L5, OR2M2 and OR5A2. In some embodiments, an olfactory receptor protein of the invention is such that the class I receptor is selected from the group consisting of OR52A5, OR52E8, OR56A4, OR51B2, OR52K1, OR56A1, OR51B5, OR56A3, and OR51L1. In some embodiments, an olfactory receptor protein of the invention is such that the sequence motif is RN[KR]E[VMI][KR]xA[LIV][KR][KR]L[LIF][KR][KR][KR] (SEQ ID NO: 5).

[0029] In some embodiments, an olfactory receptor protein of the invention is such that x is not proline. In some embodiments, an olfactory receptor protein of the invention is such that x is not proline or tryptophane. In some embodiments, an olfactory receptor protein of the invention is such that x is selected from D, K, R, E, N, V, A, Q or G, preferably wherein x is selected from D, K, R, E, N, V, A or Q.

[0030] In some embodiments, an olfactory receptor protein of the invention is such that the amino acid sequence motif comprises 1 to 6 additional C-terminal amino acid residues, optionally wherein:
[0031] the first additional amino acid residue is selected from C, R, K, E, G, H, F, P, Y, W, M and N, preferably the first additional amino acid residue is selected from C, R, K, E, G, H, F, P, Y, more preferably the first additional amino acid residue is C, R or K, most preferably C;
[0032] the second additional amino acid residue is selected from C, R, K, N, G, I, L, F, P, T, Y and Q, preferably the second additional amino acid residue is selected from C, R, K, N, G, I, L, F, P, T and Y, more preferably the second additional amino acid residue is C, R or K, most preferably C or R;
[0033] the third additional amino acid residue is selected from R, K, C, L, F, M, Y, A, P, S, G, H, and N, preferably the third additional amino acid residue is selected from R, K, C, L, F, M, Y, A, P, S and G, more preferably the third additional amino acid residue is R or K;
[0034] the fourth, fifth and sixth additional amino acid residues are selected from K and R.

[0035] In some embodiments, the amino acid sequence motif comprises additional C-terminal amino acid residues selected from the group consisting of CC, CCR, CCRR (SEQ ID NO: 161), CCRRR (SEQ ID NO: 163), CCRRRR (SEQ ID NO: 224), CR, CRR, CRRR (SEQ ID NO: 159), CRKK (SEQ ID NO: 160), CRRRR (SEQ ID NO: 162), CRRRRR (SEQ ID NO: 164), and CRRRKK (SEQ ID NO: 165).

[0036] In some embodiments, an olfactory receptor protein of the invention is such that the sequence motif is selected from the group consisting of SEQ ID NOs: 1, 5-75, 86-130, 133-147, 149-151, 154, 156-158, 166, 167, 198, 219-221, 254-312, 319-326, 328-331, 740-741, 820-890.

[0037] In some embodiments, an olfactory receptor protein of the invention is such that it further comprises an N-terminal tag peptide, preferably wherein the N-terminal tag peptide is selected from the group consisting of a FLAG tag, a rhodopsin (rho) tag, an SST₃ tag, and an M₃ tag.

[0038] Another aspect of the invention relates to a nucleic acid molecule comprising a nucleotide sequence encoding an olfactory receptor protein of the invention. In some embodiments, a nucleic acid molecule of the invention is such that it further comprises a promoter sequence, preferably a constitutive promoter sequence. In some embodiments, a nucleic acid molecule of the invention is such that it further comprises a terminator sequence. In some embodiments, a nucleic acid molecule of the invention is such that it further comprises a nucleotide sequence encoding an N-terminal signal peptide, preferably a leucine-rich signal peptide, such as, MRPQILLLLALLTLGLA (SEQ ID NO: 76) or MSHQILLLLALLTLGLA (SEQ ID NO: 77).

[0039] Another aspect of the invention relates to an expression vector comprising a nucleic acid molecule of the invention. In some embodiments, an expression vector of the invention is a plasmid.

[0040] Another aspect of the invention relates to a recombinant host cell comprising a nucleic acid molecule of the invention or an expression vector of the invention, preferably wherein the cell expresses an olfactory receptor protein of the invention. In some embodiments, a recombinant host cell of the invention is such that the cell further expresses one or more olfactory receptor accessory proteins. In some embodiments, the one or more olfactory receptor accessory proteins are selected from the group consisting of RTP1, RTP1S, RTP2, REEP, β-adrenergic receptor, heat shock protein 70, Ric8b, Gα_{olf}, Giα, and functional variants thereof, preferably selected from the group consisting of RTP1 S, RTP2 and functional variants thereof. In some embodiments, a recombinant host cell of the invention is such that the cell is a HEK293 cell or a HEK293T cell.

[0041] Another aspect of the invention relates to a library comprising a diverse repertoire of olfactory receptor proteins of the invention, nucleic acid molecules of the invention, expression vectors of the invention, or recombinant host cells of the invention. In some embodiments, a library of the invention is such that the diverse repertoire of olfactory receptor proteins, of olfactory receptor proteins encoded by the nucleic acid molecules or expression vectors, or of olfactory receptor proteins expressed by the recombinant host cells, shares the same modified C-terminal domain.

[0042] Another aspect of the invention relates to a use of an olfactory receptor protein of the invention, a nucleic acid molecule of the invention, an expression vector of the invention, a recombinant host cell of the invention, or a library of the invention, for identifying an olfactory receptor ligand, enhancer or antagonist.

[0043] Another aspect of the invention relates to a use of a library of the invention, for identifying an olfactory receptor that is capable of binding a target ligand.

[0044] Another aspect of the invention relates to a method for identifying an olfactory receptor ligand, said method comprising:
[0045] a) providing an olfactory receptor protein of the invention or a recombinant host cell expressing an olfactory receptor protein of the invention;
[0046] b) contacting said receptor or recombinant host cell with a test compound or composition; and
[0047] c) detecting activation of the olfactory receptor.

[0048] Another aspect of the invention relates to a method for identifying an olfactory receptor enhancer or antagonist, said method comprising:
[0049] a) providing an olfactory receptor protein of the invention or a cell expressing an olfactory receptor protein of the invention;
[0050] b) contacting said receptor or recombinant host cell with a cognate ligand and a test compound or composition; and
[0051] c) detecting increased or decreased activation of the olfactory receptor as compared to controls with ligand only.

[0052] In some embodiments of a method for identifying an olfactory receptor ligand, and of a method for identifying an olfactory receptor enhancer or antagonist, the olfactory receptor is selected from the group consisting of OR7C1, OR8K3 (preferably OR8K3(L122R)), OR10J5, OR7A17, OR10H5, OR5A1, OR5A2, OR1N2 (preferably OR1N2(W23R,V230G,T287M)), OR2M2, OR2V1, OR5P3, OR6P1, OR2L2 (or OR2L2(V259L)), OR10G7 (preferably OR10G7(T5S)), OR5AN1, OR5V1, OR2L3, OR2AG2 (preferably OR2AG2(Y28C)), OR7A5, OR7E24 (or OR7E24(P242S)), OR7A10, OR10H2, OR10H1, OR10D3, OR1D2, OR2A5, OR2A25 (OR2A25(S75N,A209P)), OR11 G2 (or OR11G2(I65N,V82I)), OR14J1, OR5M3, OR8D1, OR10G3 (preferably OR10G3(S73G)), OR10G9, OR2L5, OR8H1, OR10K1, OR11A1, OR2AK2 (preferably OR2AK2(S84N)), OR10A3, OR10A6 (preferably OR10A6(A117V,V140G,L287P)), OR10J1 (preferably OR10J1(M51I,I92M)), OR2J2, and OR2AG2 (preferably OR2AG2(Y28C)).

[0053] In some embodiments of a method for identifying an olfactory receptor enhancer or antagonist, the method is such that it is for identifying an olfactory receptor antagonist, and the olfactory receptor is selected from the group consisting of OR52A5, OR52E8, OR56A1, OR56A3, OR56A4, OR52K1, OR51B2 (preferably OR51B2(C120R, L134F, C209S)), OR51B5, OR9Q2, OR7D4, OR2T4, OR2C1, OR2T11, OR2M2, OR2V1, OR5V1, and OR4S2, preferably selected from the group consisting of OR2M2, OR2V1, OR51B2 (preferably OR51B2(C120R,L134F,C209S)), and OR5V1, more preferably OR2M2 or OR2V1.

[0054] In some embodiments of a method for identifying an olfactory receptor enhancer or antagonist, the method is such that it is for identifying an olfactory receptor antagonist, the olfactory receptor is OR2M2 or OR2V1, and step b) further comprises contacting said receptor or recombinant host cell with a copper salt. In some embodiments of a method for identifying an OR2M2 or OR2V1 antagonist, the cognate ligand is selected from the group consisting of 3-methyl-3-sulfanyl-hexanol, 2-mercapto-2-methyl-pentanol, and 4-methoxy-2-methylpentane-2-thiol.

[0055] In some embodiments of a method for identifying an olfactory receptor enhancer or antagonist, the method is such that it is for identifying an olfactory receptor antagonist, the olfactory receptor is OR51B2 (preferably OR51B2(C120R,L134F,C209S)). In some embodiments of a method for identifying an OR51B2 antagonist, the cognate ligand is 3-methyl-2-hexenoic acid.

[0056] In some embodiments of a method for identifying an olfactory receptor enhancer or antagonist, the method is such that it is for identifying an olfactory receptor antagonist, the olfactory receptor is OR5V1. In some embodiments of a method for identifying an OR5V1 antagonist, the cognate ligand is 2,4,6-trichloroanisol.

[0057] Another aspect of the invention relates to a method for identifying an olfactory receptor that is capable of binding a target ligand, said method comprising:
[0058] a) providing a library of the invention;
[0059] b) optionally, obtaining a diverse repertoire of olfactory receptor proteins or recombinant host cells expressing olfactory receptor proteins from said library;
[0060] c) contacting the diverse repertoire of olfactory receptor proteins or recombinant host cells expressing olfactory receptor proteins with the target ligand; and
[0061] d) identifying an olfactory receptor that is activated by the target ligand.

[0062] Another aspect of the invention relates to a method for generating an objective representation of the olfactory properties of a test compound or composition, said method comprising:
[0063] a) providing a library of the invention;
[0064] b) optionally, obtaining a diverse repertoire of olfactory receptor proteins or cells expressing olfactory receptor proteins from said library;
[0065] c) contacting the diverse repertoire of olfactory receptor proteins or cells expressing olfactory receptor proteins with the test compound or composition; and
[0066] d) detecting activation of each of the olfactory receptor proteins.

[0067] Another aspect of the invention relates to a method for assessing the difference or similarity between two or more test compounds or compositions, said method comprising:
[0068] a) providing a library of the invention;
[0069] b) optionally, obtaining a diverse repertoire of olfactory receptor proteins or cells expressing olfactory receptor proteins from said library;
[0070] c) contacting the diverse repertoire of olfactory receptor proteins or cells expressing olfactory receptor proteins with each of the two or more test compounds or compositions;
[0071] d) detecting activation of each of the olfactory receptor proteins for each of the two or more test compounds or compositions; and
[0072] e) comparing the activated olfactory receptor proteins between each of the two or more test compounds or compositions.

### DESCRIPTION

[0073] Various features of the aspects and embodiments of this disclosure are further described below. It is noted that headings used throughout this specification are to assist navigation only and should not be interpreted as definitive, and that features described in different sections may be relevant for all aspects and embodiments described herein and may thus be combined as appropriate.

### INTRODUCTION

[0074] Next to the modification of the N-terminus of olfactory receptors by adding e.g. a rho-Tag, other changes to the sequences of olfactory receptors have also been made in an attempt to improve their expression.

[0075] In one attempt, a consensus sequence was derived from each different class of olfactory receptors, and it was found that for the resulting nine consensus receptors in six out of nine cases a highly expressed receptor was generated, which in general is better expressed than the individual receptors in the class (Ikegami et al. Structural instability and divergence from conserved residues underlie intracellular retention of mammalian odorant receptors. PNAS 2020; 117(6):2957-2967). This consensus approach addressed the full-length sequence of the receptor, meaning that the resulting consensus receptor does not correspond to the ligand affinity of a single native receptor but rather is a fully synthetic receptor with a novel ligand spectrum and thus not of interest for screening commercially interesting odorants perceived by the human nose.

[0076] There have also been reports on the modification of the C-terminal sequence of OR genes. As shown below, changing or truncating the C-terminal sequence in most cases led to reduced activity, and only in few instances in a higher signal amplitude. So far changing the C-terminus of an OR never led to a significantly more sensitive assay, i.e. an assay which allows testing at significantly lower test concentrations.

[0077] Kotthoff et al. found that truncating human OR8D1 by three amino acids reduced signal amplitude, truncating by seven amino acids or by 11 or by 15 amino acids abolished the signal, but they did not find enhanced functions of a truncated C-terminus (Kotthoff et al. The FASEB Journal 2021; 35:e21274.). Changing the C-terminus had negative effects in OR8D1. However, changing the parent C-terminus sequence towards the consensus sequence had a positive effect in two cases: thus, changing the C-terminus of human OR2M3 towards the consensus sequence by changing three amino acids did enhance signal amplitude three-fold, but it did not significantly enhance sensitivity/potency, i.e. it did not shift the dose-response curve towards lower concentrations. Changing mouse olfr16 towards consensus doubled signal amplitude, but it only marginally enhanced sensitivity (EC50 from 33.99 to 20.42 micromolar, Table S19 in said reference). All other changes introduced to the C terminus (>70 variants investigated) always led to reduced activity and/or reduced surface expression, indicating overall that no large improvement of receptor expression and assay sensitivity was possible by changing the C terminus.

[0078] In a very detailed analysis in the above-mentioned reference (Ikegami et al. 2020), two closely related mouse receptors (mouse Olfr539 and Olfr541) were compared, whereby Olfr541 is poorly expressed and Olfr539 is well expressed. By exchanging parts of the sequence or even single amino acids of the central domain of Olfr541 with the sequence from Olfr539, strong expression could be achieved, however replacing the C-terminus of the poorly expressed Olf541 with the C-terminus of the well expressed Olfr539 did not enhance the expression of Olfr541, indicating that other parts of the sequence and not the C-terminus are critical to confer functional expression.

[0079] In another example, the sequence of the human OR5A2 was modified both at the C terminus and at the N terminus by exchanging the OR5A2 sequence with the OR2A5 sequence to generate a chimeric receptor (Example 5 in WO2019110630A1). The resulting receptor responded equally well to musk compounds as the wild-type receptor, and the dose-response curve was not changed nor was sensitivity enhanced by the changed C-terminus.

[0080] Furthermore, in a frequently cited work (Krautwurst et al. Identification of ligands for olfactory receptors by functional expression of a receptor library. Cell. 1998; 95(7):917-26), Krautwurst et al. used the N-terminal sequence and the C-terminal sequence of the well-expressed mouse receptor M4 and entered the sequence from TM2-TM7 of other tested receptors into this backbone to generate chimeric receptors. Chimeric receptors with this M4 backbone responded equally as the wild-type receptors, but no enhanced signal or better functionality was shown for the chimeric receptors and in one instance a response at an even lower concentration (1 μM instead of 10 μM) was reported for the wild-type mouse 17 receptor as compared to the chimeric receptor indicating that exchanging the C-terminus with a C-terminus of a well expressed receptor can mostly maintain, but not increase activity.

[0081] Katada et al. found that truncating mouse mOR-EG by three amino acids reduced signal amplitude, truncating by six amino acids reduced signal amplitude and sensitivity, truncating by 12 amino acids abolished the signal, but they did not find enhanced functions of a truncated C-terminus indicating that in the investigated cases the full-length C-terminus is required (Kadata et al. Structural determinants for membrane trafficking and G protein selectivity of a mouse olfactory receptor. Journal of Neurochemistry 2004; 90(6):1453-1463).

[0082] Kato et al. found that mutating K296, K299, K303, K304 and K309 in the C terminus of the mouse mOR-EG to proline reduces/abolishes activity, mutations in these residues to Ala or Arg did not significantly affect the activity (with the exception of K296A which reduced sensitivity), but this study did not find enhanced functions (enhanced amplitude or enhanced sensitivity) of mutated C-terminus sequences and indicated that most of these basic residues appear to be non-essential for functional expression (Kato et al. Amino acids involved in conformational dynamics and G protein coupling of an odorant receptor: targeting gain-of-function mutation. Journal of Neurochemistry 2008; 107(5):1261-1270).

[0083] Finally, Sato et al. investigated C-terminal olfactory receptor sequence and which residues are key, and they found that residues 299, 300, 303, and 304 in the C-terminus of mOR-S6 are important to maintain function, but they did not find enhanced functions for C-terminus modifications (Sato et al. Functional Role of the C-Terminal Amphipathic Helix 8 of Olfactory Receptors and Other G Protein-Coupled Receptors. Int. J. Mol. Sci. 2016; 17(11):1930).

[0084] Taken together, despite the long-known improvement of olfactory receptor expression by changing the N-terminus by the addition of a rho-Tag, attempts at changing the C-terminus did not lead to significantly improved assays but mainly showed that the C-terminus is sensitive to changes in structure which in most cases leads to loss of function and not to gain of function modifications. Based on these teachings, it was not to be expected that a major advancement in the functional expression of olfactory receptors could be gained from changing the C-terminal sequence. Rather, this detailed analysis did not indicate that truncating the C-terminus of the receptor or changing the C-terminus towards consensus can enhance sensitivity of the assay significantly, but it indicated that the signal amplitude can be enhanced in few selected cases, while the majority of changes to the C-terminus had a negative effect.

### Olfactory Receptor Proteins

[0085] This disclosure generally concerns olfactory receptor proteins (ORs) with modified C-terminal domains. Accordingly, provided herein is an olfactory receptor protein, wherein said protein has a modified C-terminal domain. Preferably, the olfactory receptor protein is a mammalian, more preferably a human olfactory receptor protein. Preferably, the olfactory receptor protein corresponds to a Class I or Class II OR, as described later herein.

[0086] The term “olfactory receptor” or “odorant receptor” (OR) as used herein has its customary meaning as ordinarily understood by the skilled person in view of this disclosure. It refers to receptors pertaining to the seven-transmembrane-domain G protein-coupled receptor superfamily (GPCRs), which are typically expressed in the cell membrane of olfactory receptor neurons. The predicted seven-transmembrane (TM) domains TM I to TM VII are connected by three predicted internal (IC) loop domains (IC I to IC III), and three predicted external (EC) loop domains (EC I to EC III). ORs typically comprise olfactory receptor-specific amino acid motifs. Examples of such motifs are a MAYDRYVAIC (SEQ ID NO: 2) motif overlapping TM III and IC II, a FSTCSSH (SEQ ID NO: 3) motif overlapping IC III and TM VI, a PMLNPFIY (SEQ ID NO: 4) motif in TM VII as well as three conserved C residues in EC II, and the presence of highly conserved GN residues in TM I, discussed in Zhang and Firestein (2002) Nature Neurosci 5(2): 124-33, and Malnic et al. (2004) PNAS 101(8):2584-9, both of which are incorporated herein by reference.

[0087] The C-terminal domain of an olfactory receptor starts right after the end of the seventh TM helix (TM7). The skilled person can determine this position without doubt on the basis of his common general knowledge. For example, the seventh transmembrane region (TM7) can easily be recognized within any OR based on sequence alignment or by using well-known and publicly available databases. For example, the “GPCR Prediction Ensemble Database (GPCR-PEnDB)” available at https://gpcr.utep.edu/database indicates the amino acid positions of TM7 and the length of the native C-terminus for many ORs.

[0088] The same information can be derived from the “HORDE” (The Human Olfactory Data Explorer) database maintained by the Weizmann Institute of Science and available at https://genome.weizmann.ac.il/horde/, described in Olender et al. (2013) Methods Mol Biol 1003:23-38, incorporated herein by reference. In HORDE, the residues of all of TM1-TM7 are annotated.

[0089] The same information can also be found in general sequence databases such as Uniprot (The UniProt Consortium, UniProt: the universal protein knowledgebase in 2021, Nucleic Acids Research, Volume 49, Issue D1, 8 Jan. 2021, Pages D480-D489, available at www.uniprot.org).

[0090] TM7 in Class II olfactory receptors typically ends with the consensus sequence NPLIYSL (SEQ ID NO: 225), with the last of these seven amino acids usually located at residue 292-298 of the full-length receptor and the end of TM7 can thus easily be identified for any given OR. Directly after this sequence (or at the position where the native C-terminus starts as indicated under https://gpcr.utep.edu/database) the above modified C-terminus is fused to the olfactory receptor for improved functional expression.

[0091] TM7 in Class I olfactory receptors typically ends with the consensus sequence NPIIYSL (SEQ ID NO: 226) or NPIIYSGL (SEQ ID NO: 227), with the last of these seven amino acids usually located at residue 297 (290-300). Directly after this sequence (or at the position where the native C-terminus starts as indicated under https://gpcr.utep.edu/database) the above modified C-terminus is fused to the olfactory receptor for improved functional expression.

[0092] Accordingly, in some embodiments, the C-terminal domain as described herein is such that it starts right after the last residue of the seventh transmembrane helix (TM7). In some embodiments, the C-terminal domain is fused to the seventh transmembrane helix of the olfactory receptor protein. In some embodiments, the C-terminal domain as described herein may also be referred to as the cytoplasmic or intracellular domain.

[0093] Thus, in some embodiments, olfactory receptors as described herein comprise an amino acid sequence of an olfactory receptor up to and including the last residue of the olfactory receptor's seventh transmembrane helix (TM7), followed by an amino acid sequence of a modified C-terminal domain comprising an amino acid sequence motif as described herein.

[0094] The modified C-terminal domain may comprise or consist of 10 to 40 amino acids, preferably 12 to 30 amino acids, more preferably 14 to 26 amino acids, even more preferably 16 to 22 amino acids. In some embodiments, the minimum length of the modified C-terminal domain of the olfactory receptors of this disclosure is 10, 11, 12, 13, 14, 15 or 16 amino acids; and the maximum length of the modified C-terminal domain of the olfactory receptors of this disclosure is 26, 25, 24, 23 or 22 amino acids.

[0095] The present inventors have found that particularly advantageous effects described herein are observed for modified C-terminal domains that are rich in basic amino acids. A basic amino acid, as used herein, is understood to refer to an amino acid having a side chain that is protonated at neutral pH. Basic amino acids include lysine (Lys, K), arginine (Arg, R), and histidine (His, H). Preferred basic amino acids in the context of this disclosure are lysine and arginine.

[0096] Accordingly, in some embodiments, a modified C-terminal domain as described herein is a modified C-terminal domain comprising at least 5 basic residues, preferably at least 6 basic residues, more preferably at least 7 basic residues. In some embodiments, a modified C-terminal domain as described herein is a modified C-terminal domain in which at least 32%, at least 33%, at least 34%, at least 35%, at least 36%, at least 37%, at least 38%, at least 39%, at least 40%, at least 41%, at least 42%, or at least 43% of the amino acids is a basic amino acid (i.e., lysine, arginine, or histidine). In preferred embodiments, a modified C-terminal domain as described herein is a modified C-terminal domain in which at least 32% of the amino acids is a basic amino acid (i.e., lysine, arginine, or histidine). In preferred embodiments, a modified C-terminal domain as described herein is a modified C-terminal domain in which at least 35% of the amino acids is a basic amino acid (i.e., lysine, arginine, or histidine). In preferred embodiments, a modified C-terminal domain as described herein is a modified C-terminal domain in which at least 38% of the amino acids is a basic amino acid (i.e., lysine, arginine, or histidine).

[0097] In an aspect, there is provided an olfactory receptor protein, wherein said protein has a modified C-terminal domain comprising the amino acid sequence motif:

(SEQ ID NO: 1)
RN[KR][EDQ][VMIL][KR]xA[LIV][KRH][KR][LI][LIF]
[KRG][KR][KR].

[0098] A “sequence motif” may also be denoted as a “sequence pattern” or, simply, a “sequence”. A “sequence motif” or “sequence pattern” has its customary and ordinary meaning as understood by one of skill in the art in view of this disclosure. It refers to an amino acid (or nucleotide) sequence that recurs, with a certain degree of variation, on several sites of a molecule or several different molecules and has (or is conjectured to have or is assumed to be linked to) a biological significance or exhibits a biological activity as described herein. A biological significance or biological activity of the sequence motifs described herein is preferably its ability to improve the functional heterologous expression of (nucleotide sequences encoding) an olfactory receptor protein comprising said motif as a C-terminal domain.

[0099] As used herein, the term “expression” or “heterologous expression” of a DNA molecule by a cell includes any step involved in the production of a polypeptide by a cell including, but not limited to, transcription, post-transcriptional modification, translation, post-translational modification, transport to a cellular membrane, and secretion. Expression may be assessed by any method known to a person of skill in the art. For example, expression may be assessed by measuring the levels of gene expression in a transduced cell on the level of the mRNA or the protein by standard assays known to a person of skill in the art, such as qPCR, RNA sequencing, Northern blot analysis, Western blot analysis, mass spectrometry analysis of protein-derived peptides, fluorescence activated cell sorting (FACS), immunostaining or ELISA.

[0100] As used herein, the term “functional expression” or “functional heterologous expression” refers to the production of a polypeptide by a cell wherein the polypeptide exhibits a biological activity. For example, an olfactory receptor is functionally expressed by a cell when said receptor, following its production, is transported and incorporated into the cellular membrane and is able to trigger its corresponding signalling cascade following its activation by a ligand. Conventional methods assessing the functional expression of an olfactory receptor involve the expression of said OR with the co-expression of a luciferase gene operably linked to a cAMP-inducible promoter (Saito et al. (2004) Cell 119(5): 679-691), which is used as a reporter gene. If the olfactory receptor is functionally expressed, its activation and subsequent resulting increase in intracellular cAMP results in an increase of luciferase expression. Oxidation of luciferin by luciferase in standard assays results in the emission of light which can then be detected and quantified.

[0101] The sensory potency of odorants, and hence the potency of the odorant-OR interaction in vivo is most commonly described as the odor detection threshold for an odorant (OTH), i.e. the lowest concentration in the gas phase which is detected by the human nose. The terms “odor detection threshold” and “odor threshold”, also abbreviated herein as “OTH”, are synonymous and are well-established terms in the fragrance field, see for example “The Measuring of Odors” by Neuner-Jehle, N., Etzweiler, F. (1994). In: Maller, P. M., Lamparsky, D. (eds) Perfumes. Springer, Dordrecht, incorporated herein by reference in its entirety. Odor detection thresholds can be measured by methods and means commonly available in the art, for example by making use of an olfactometer in conjunction with human subjects. Another possibility to measure the odor detection threshold is to inject a dilution series of defined quantities (measured in ng) of the ligand into a gas chromatograph (GC), whereby a human panellist is sniffing the molecule as emitted from the GC-column at a Sniff port and indicating whether it is detectable by the nose. This gives the GC-threshold (GCO) in ng.

[0102] In OR screening assays applying OR in in vitro systems, the ligands are dissolved in a liquid medium. Nevertheless, similar to an in vivo odor threshold experiment, the lowest dose can be determined at which an odorant can start to activate the receptor in the in vitro experiment, whereby sensitivity in the in vitro system is reported as the lowest concentration dissolved in the medium which starts to activate a receptor, while sensitivity in vivo is expressed as the lowest detectable concentration in the gas phase. As a practical possibility the detection threshold in vitro can be defined as the concentration leading to a two-fold response vs. the background signal in e.g. a luciferase assay as described herein.

[0103] Functional expression of an olfactory receptor polypeptide as described herein is improved (increased) relative to a baseline functional expression, leading to improved (increased) biological activity, for example relative to a non-modified corresponding receptor gene. Said functional expression may be improved (increased) by at least 10%, at least 20%, at least 30%, at least 40%, at least 50%, at least 60%, at least 70%, at least 80%, at least 100%, at least 200%, at least 300%, at least 500%, relative to a non-modified corresponding receptor gene. Such improvement of functional expression may also be manifest in an increase of the sensitivity of recombinant host cells expressing an olfactory receptor polypeptide as described herein, such that the detection threshold of the receptor in an in vitro assay is reduced at least a factor of 2-fold, at least 3.1-fold, at least 10-fold at least 20-fold or at least 50-fold, preferably at least 3.1-fold (i.e. increased detection sensitivity of a ligand tested). Such improvement of functional expression may further be manifest in an increase of the sensitivity of recombinant host cells expressing an olfactory receptor polypeptide as described herein (described elsewhere herein), such that the EC50, i.e. the concentration to reach 50% of the maximal signal amplitude is decreased by a factor of at least 2-fold, at least 3.1-fold, at least 10-fold at least 20-fold or at least 50-fold, preferably at least 3.1-fold (i.e. enhanced potency of a ligand tested). Such improvement of functional expression may also be manifested in an increase of the sensitivity of recombinant host cells expressing an olfactory receptor polypeptide as described herein, such that the maximal signal amplitude is enhanced by at least 30%, at least 50%, at least 80%, at least 100% at least 200% at least 500% (i.e. increased efficacy of a ligand tested). Improvement of functional expression may also be of such a magnitude that functional expression of olfactory receptors otherwise not possible using conventional approaches is achieved using the olfactory receptors, nucleic acid molecules, expression vectors, recombinant host cells, and methods and uses of the disclosure (all-or-nothing effect which cannot be quantified in numbers).

[0104] Several customary notations for describing sequence motifs are in use and are known to the skilled person, most of them being variants of standard notations for regular expressions and using at least the following conventions:
[0105] there is an alphabet of single characters, i.e. the standard IUPAC one-letter codes for the amino acids, each denoting a specific amino acid or a set of amino acids;
[0106] a string of characters drawn from the alphabet denotes a sequence of the corresponding amino acids;
[0107] a string of characters between square brackets matches any one of the listed amino acids, i.e. it denotes sequence ambiguities or alternatives, e.g. the hypothetical notation [XYZ] means X or Y or Z;
[0108] a string of characters between braces/curly brackets (“{ }”) means any amino acid except the listed amino acid, e.g. the hypothetical notation {X} means any amino acid except X.

[0109] Thus, the 16 amino acids in the sequence motif depicted above:

(SEQ ID NO: 1)
RN[KR][EDQ][VMIL][KR]xA[LIV][KRH][KR][LI][LIF]
[KRG][KR][KR].

are defined as follows:
[0110] the first residue is R;
[0111] the second residue is N;
[0112] the third residue is K or R;
[0113] the fourth residue is E or D or Q;
[0114] the fifth residue is V or M or I or L;
[0115] the sixth residue is K or R;
[0116] the seventh residue can be any amino acid;
[0117] the eighth residue is A;
[0118] the ninth residue is L or I or V;
[0119] the tenth residue is K or R or H;
[0120] the eleventh residue is K or R;
[0121] the twelfth residue is L or I;
[0122] the thirteenth residue is L or I or F;
[0123] the fourteenth residue is K or R or G;
[0124] the fifteenth residue is K or R; and
[0125] the sixteenth residue is K or R.

[0126] Thus, the sequence motif depicted above:

(SEQ ID NO: 1)
RN[KR][EDQ][VMIL][KR]xA[LIV][KRH][KR][LI][LIF]
[KRG][KR][KR]

may also alternatively be described as: RNX₁X₂X₃X₄X₅AX₆X₇X₈X₉X₁₀X₁₁X₁₂X₁₃, wherein:
[0127] X₁ is K or R;
[0128] X₂ is E or D or Q;
[0129] X₃ is V or M or I or L;
[0130] X₄ is K or R;
[0131] X₅ is any amino acid;
[0132] X₆ is L or I or V;
[0133] X₇ is K or R or H;
[0134] X₈ is K or R;
[0135] X₉ is L or I;
[0136] X₁₀ is L or I or F;
[0137] X₁₁ is K or R or G;
[0138] X₁₂ is K or R; and
[0139] X₁₃ is K or R.

[0140] Taking into account that the standard IUPAC one-letter codes for amino acids include the symbol “J” for denoting leucine (L) or isoleucine (I), the above-depicted sequence motif may alternatively be described as: RNX₁X₂X₃X₄X₅AX₆X₇X₈JX₁₀X₁₁X₁₂X₁₃ (SEQ ID NO: 1), wherein:
[0141] X₁ is K or R;
[0142] X₂ is E or D or Q;
[0143] X₃ is V or M or I or L;
[0144] X₄ is K or R;
[0145] X₅ is any amino acid;
[0146] X₆ is L or I or V;
[0147] X₇ is K or R or H;
[0148] X₈ is K or R;
[0149] X₁₀ is L or I or F;
[0150] X₁₁ is K or R or G;
[0151] X₁₂ is K or R; and
[0152] X₁₃ is K or R.

[0153] All of the above notations are completely equivalent and represent the same sequence (SEQ ID NO: 1); thus, a skilled person understands that they can be used interchangeably. The same holds true for any other sequence motif described herein.

[0154] Olfactory receptors may be classified as Class I or “fish-like” receptors, and Class II or “tetrapod” receptors. Class I or “fish-like” receptors are an evolutionary more ancient class of receptors known to respond especially to more soluble compounds such as carboxylic acids and it has a particular interest in the screening for antagonists to malodorants. The majority of the olfactory receptors belong to Class II or “tetrapod” receptors and these comprise the key receptors for most fragrant molecules. There is a considerable difference in the C-terminal sequence between Class I and Class II receptors, however, the present disclosure is targeted at both Class I and Class II olfactory receptors.

[0155] Accordingly, in some embodiments, an olfactory receptor protein as described herein is a class I or class II olfactory receptor with a modified C-terminal domain.

[0156] The olfactory receptor proteins of this disclosure have a modified C-terminal domain. Thus, the C-terminal domain of the olfactory receptor proteins of this disclosure differs from the natural or cognate C-terminal domain with which said olfactory receptor is normally associated. Therefore, the olfactory receptor proteins of this disclosure are non-naturally occurring proteins. It follows that the olfactory receptor proteins described herein can be characterized as “modified” olfactory receptor proteins, “engineered” olfactory receptor proteins, “hybrid” olfactory receptor proteins, “chimeric” olfactory receptor proteins, “non-natural” olfactory receptor proteins, or similar expressions and combinations thereof. Throughout this disclosure, the skilled person understands that the term “olfactory receptor protein” may be replaced with the term “olfactory receptor protein having a modified C-terminal domain”.

[0157] This disclosure encompasses olfactory receptor proteins from any mammal. Accordingly, in some embodiments, an olfactory receptor protein as described herein is a mammalian olfactory receptor having a modified C-terminal domain, preferably a mammalian class I or class II olfactory receptor with a modified C-terminal domain. Preferred mammals in the context of this disclosure are pet or companian animals and humans, with humans being more preferred. Within the pet or companion animals, cats and dogs are particularly preferred. Accordingly, in some embodiments, an olfactory receptor protein as described herein is a human, dog or cat olfactory receptor having a modified C-terminal domain, preferably a human olfactory receptor having a modified C-terminal domain. In some embodiments, an olfactory receptor protein as described herein is a human, dog or cat class I or class II olfactory receptor having a modified C-terminal domain, preferably a human class I or class II olfactory receptor having a modified C-terminal domain.

[0158] Mammalian and human olfactory receptors are discussed in publications such as Mainland et al. (2015) Sci Data 2:150002, incorporated herein by reference, and in publicly available databases, such as the HORDE (The Human Olfactory Data Explorer) database maintained by the Weizmann Institute of Science and available at https://genome.weizmann.ac.il/horde/, described in Olender et al. (2013) Methods Mol Biol 1003:23-38, incorporated herein by reference. Other relevant publicly available databases exist, for example as described in Marenco et al. Database (Oxford) 2016:baw132 and Han et al. Science China. Life sciences, 10.1007/s11427-021-2081-6.

[0159] The complete list of human olfactory receptors and their alleles or haplotypes can be found in the HORDE database mentioned above. Major alleles or haplotypes are defined as those with >20% frequency in the human population according to the HORDE database. A listing of all the amino acid sequences of the main alleles or haplotypes of the vast majority of human olfactory receptors is available to the skilled person and can be found as supporting information to Ikegami et al. 2020 (supra), while the nucleotide sequence of 625 genes covering the vast majority of human OR genes and their major alleles or haplotypes is included as supporting information to Mainland et al. 2015 (supra). All known human olfactory receptors are also available from general sequence databases such as NCBI Genbank available at https://www.ncbi.nlm.nih.gov/genbank/.

[0160] In some embodiments, an olfactory receptor protein as described herein is selected from the group consisting of OR10A2, OR10A3, OR10A4, OR10A5, OR10A6, OR10A7, OR10AD1, OR10AG1, OR10C1, OR10D3, OR10G2, OR10G3, OR10G4, OR10G6, OR10G7, OR10G8, OR10G9, OR10H1, OR10H2, OR10H3, OR10H4, OR10H5, OR10J1, OR10J3, OR10J5, OR10K1, OR10K2, OR10P1, OR10P2, OR10Q1, OR10R2, OR10S1, OR10T2, OR10V1, OR10W1, OR10X1, OR10Z1, OR11A1, OR11G2, OR11H1, OR11H2, OR11H4, OR11H6, OR11L1, OR12D2, OR12D3, OR13C2, OR13C3, OR13C4, OR13C5, OR13C8, OR13C9, OR13D1, OR13F1, OR13G1, OR13H1, OR13J1, OR14A16, OR14A2, OR14C36, OR1411, OR14L1P, OR1A1, OR1A2, OR1B1, OR1C1, OR1D2, OR1D4, OR1D5, OR1E1, OR1E2, OR1F1, OR1F12, OR1G1, OR111, OR1J1, OR1J2, OR1J4, OR1K1, OR1L1, OR1L3, OR1L4, OR1L6, OR1L8, OR1M1, OR1N1, OR1N2, OR1Q1, OR1S1, OR1 S2, OR2A1, OR2A12, OR2A14, OR2A2, OR2A25, OR2A4, OR2A42, OR2A5, OR2A7, OR2A9P, ORAE1, OR2AG1, OR2AG2, OR2AJ1, OR2AK2, OR2AP1, OR2AT4, OR2B11, OR2B2, OR2B3, OR2B6, OR2B8P, OR2C1, OR2C3, OR2D2, OR2D3, OR2F1, OR2F2, OR2G2, OR2G3, OR2G6, OR2H1, OR2H2, OR2J1P, OR2J2, OR2J3, OR2K2, OR2L13, OR2L2, OR2L3, OR2L5, OR2L8, OR2M2, OR2M3, OR2M4, OR2M5, OR2M7, OR2S2, OR2T1, OR2T10, OR2T11, OR2T12, OR2T2, OR2T27, OR2T29, OR2T3, OR2T33, OR2T34, OR2T35, OR2T40R2T5, OR2T6, OR2T7, OR2T8, OR2V1, OR2V2, OR2W1, OR2W3, OR2W5, OR2Y1, OR2Z1, OR3A1, OR3A2, OR3A3, OR3A4, OR4A15, OR4A16, OR4A4, R4A47, OR4A5, OR4B1, OR4C11, OR4C12, OR4C13, OR4C15, OR4C16, OR4C, OR4C45, OR4C46, OR4C5, OR4C6, OR4D1, OR4D10, OR4D11, OR4D2, OR4D5, OR4D6, OR4D9, OR4E2, OR4F15, OR4F16, OR4F17, OR4F21, OR4F29, OR4F3, OR4F4, OR4F5, OR4F6, OR4K1, OR4K13, OR4K14, OR4K15, OR4K17, OR4K2, OR4K3P, OR4K5, OR4L1, OR4M1, OR4M2, OR4N2, OR4N4, OR4N5, OR4P4, OR4Q3, OR4S1, OR4S2, OR4X1, OR4X2, OR51A2, OR51A4, OR51A7, OR51B2, OR51B4, OR51B5, OR51B6, OR51 D1, OR51E1, OR51E2, OR51F1, OR51F2, OR51G1, OR51G2, OR51H1P, OR5111, OR5112, OR51J1, OR51L1, OR51M1, OR51Q1, OR51S1, OR51T1, OR51V1, OR52A1, OR52A4, OR52A5, OR52B2, OR52B4, OR52B6, OR52D1, OR52E2, OR52E4, OR52E5, OR52E6, OR52E8, OR52H1, OR5211, OR5212, OR52J3, OR52K1, OR52K2, OR52L1, OR52M1, OR52N1, OR52N2, OR52N4, OR52N5, OR52P1P, OR52R1, OR52W1, OR56A1, OR56A3, OR56A4, OR56A5, OR56B1, OR56B4, OR5A1, OR5A2, OR5AC2, OR5AK2, OR5AL1P, OR5AN1, OR5AP2, OR5AR1, OR5AS1, OR5AU1, OR5B12, OR5B17, OR5B2, OR5B21, OR5B3, OR5C1, OR5D13, OR5D14, OR5D16, OR5D18, OR5F1, OR5H1, OR5H14, OR5H15, OR5H2, OR5H6, OR5I1, OR5J2, OR5K1, OR5K2, OR5K3, OR5K4, OR5L1, OR5L2, OR5M1, OR5M10, OR5M11, OR5M3, OR5M8, OR5M9, OR5P2, OR5P3, OR5R1, OR5T1, OR5T2, OR5T3, OR5V1, OR5W2, OR6A2, OR6B1, OR6B2, OR6B3, OR6C1, OR6C2, OR6C3, OR6C4, OR6C6, OR6C65, OR6C68, OR6C70, OR6C74, OR6C75, OR6C76, OR6F1, OR6J1, OR6K2, OR6K3, OR6K6, OR6M1, OR6N1, OR6N2, OR6P1, OR6Q1, OR6S1, OR6T1, OR6X1, OR6Y1, OR7A10, OR7A17, OR7A5, OR7C1, OR7C2, OR7D2, OR7D4, OR7E24, OR7G1, OR7G2, OR7G3, OR8A1, OR8B12, OR8B2, OR8B3, OR8B4, OR8B8, OR8D1, OR8D2, OR8D4, OR8G1, OR8G5, OR8H1, OR8H2, OR8H3, OR812, OR8J1, OR8J3, OR8K1, OR8K3, OR8K5, OR8S1, OR8U1, OR8U8, OR8U9, OR9A2, OR9A4, OR9G1, OR9G4, OR9G9, OR911, OR9K2, OR9Q1, and OR9Q2. Variants and haplotypes of these receptors are also encompassed.

[0161] In some embodiments, an olfactory receptor protein as described herein is:
[0162] a class II olfactory receptor listed as “receptor” in Table 15, or
[0163] a class I olfactory receptor listed as “receptor” in Table 22.

[0164] The specific sequences mentioned in Table 15 (for DNA encoding the modified receptor including an N-terminal mmLucy-FLAG-rho tag (SEQ ID NO: 81) and a modified C-terminus (SEQ ID NO: 221)) and in Table 22 (for DNA encoding the modified receptor including an N-terminal mmLucy-FLAG-rho tag (SEQ ID NO: 81) and a modified C-terminus (SEQ ID NO: 741)) are specific embodiments which are not limiting in this context. The presence of the N-terminal tag is optional, and different N-terminal tags could be used, as described elsewhere herein. Similarly, any modified C-terminal domain disclosed herein may be used instead of the modified C-terminus of SEQ ID NO: 221 or SEQ ID NO: 741.

[0165] A modified C-terminal domain as described herein may comprise the sequence RNKEVKDALKRLLKRK (SEQ ID NO: 10). In some embodiments, the sequence RNKEVKDALKRLLKRK (SEQ ID NO: 10) may contain amino acid substitutions at 1, 2, 3, 4, 5, 6, 7, 8, or up to 9 positions. In some embodiments, the sequence may contain amino acid substitutions at 1, 2, 3, 4, or up to 5 positions but the residues at the first (R), second (N) and eighth (A) positions are fixed. In some embodiments, the sequence may contain amino acid substitutions at 1, 2, 3, 4, 5, 6, 7, 8, or up to 9 positions but the residues at the first (R), second (N), fourth (E) and eigth (A) positions are fixed. Amino acid substitutions can preferably be conservative amino acid substitutions, as described elsewhere herein. Examples of particularly suitable amino acid substitutions in this context include the substitution of K for R, and R for K.

[0166] In some embodiments, an olfactory receptor protein as described herein is a class II olfactory receptor having a modified C-terminal domain. In some embodiments, the class II olfactory receptor is selected from the group consisting of OR7C1, OR9Q2, OR8K3, OR10J5, OR1C1, OR7D4, OR2T4, OR5B12, OR7A17, OR10H5, OR5A1, OR5A2, OR1N2, OR2C1, OR2T11, OR2M2, and OR4S2, preferably selected from the group consisting of OR7A17, OR2M2 and OR5A2. In some embodiments, the class II olfactory receptor is selected from the group consisting of OR2V1, OR5P3, OR6P1, OR2L2, OR10G7, OR5AN1, OR5V1, OR2L3, OR2AG2, OR7A5, OR7E24, OR7A10, OR10H2, OR10H1, OR10D3, OR1D2, OR2A5, OR2A25, OR11G2, OR14J1, OR5A1, OR5M3, OR8D1, OR10G3, OR10G9, OR2L5, OR8H1, OR10K1, OR11A1, OR2AK2, OR10A3, OR10A6, OR10J1, and OR2J2. In some embodiments, the class II olfactory receptor is selected from the group consisting of OR7C1, OR9Q2, OR8K3, OR10J5, OR1C1, OR7D4, OR2T4, OR5B12, OR7A17, OR10H5, OR5A1, OR5A2, OR1N2, OR2C1, OR2T11, OR2M2, OR4S2, OR2V1, OR5P3, OR6P1, OR2L2, OR10G7, OR5AN1, OR5V1, OR2L3, OR2AG2, OR7A5, OR7E24, OR7A10, OR10H2, OR10H1, OR10D3, OR1D2, OR2A5, OR2A25, OR11G2, OR14J1, OR5M3, OR8D1, OR10G3, OR10G9, OR2L5, OR8H1, OR10K1, OR11A1, OR2AK2, OR10A3, OR10A6, OR10J1, and OR2J2, preferably selected from the group consisting of OR7A17, OR7C1, OR2A25, OR7E24, OR10H1, OR10K1, OR2AG2, OR10H2, OR10H5, OR10D3, OR14J1, OR7A10, OR2L5, OR2M2 and OR5A2.

[0167] OR7C1, OR9Q2, OR8K3, OR10J5, OR1C1, OR7D4, OR2T4, OR5B12, OR7A17, OR10H5, OR5A1, OR5A2, OR1N2, OR2C1, OR2T11, OR2M2, OR4S2, OR2L3, OR2AG2, OR7A5, OR7E24, OR7A10, OR10H2, OR10H1, OR10D3, OR1D2, OR2A5, OR2A25, OR11G2, OR14J1, OR5M3, OR8D1, OR10G3(S73G), OR10G9, OR2L5, OR8H1, OR10K1, OR11A1, OR2AK2, OR10A3, OR10A6, OR10J1, and OR2J2 are human class II olfactory receptors.

[0168] OR2A25 may also be OR2A25(S75N,A209P), OR1N2 may also be OR1N2(W23R,V230G,T287M), OR7E24 may also be OR7E24(P242S), OR2AG2 may also be OR2AG2(Y28C), OR8K3 may also be OR8K3(L122R). OR2L2 may also be OR2L2(V259L), OR11G2 may also be OR11G2(I65N,V82I), OR10G7 may also be OR10G7(T5S), OR2AK2 may also be OR2AK2(S84N), OR10A6 may also be OR10A6(A117V,V140G,L287P). OR10J1 may also be OR10J1(M51I,I92M), OR10G3 may also be OR10G3(S73G).

[0169] In some embodiments, (wild type) OR7C1 has an amino acid sequence encoded by the nucleotide sequence of NCBI Gene ID 26664 (NCBI Reference Sequence NP_001357414.2). In some embodiments, (wild type) OR9Q2 has an amino acid sequence encoded by the nucleotide sequence of NCBI Gene ID 219957 (NCBI Reference Sequence: NP_001005283.1). In some embodiments, (wild type) OR8K3 has an amino acid sequence encoded by the nucleotide sequence of NCBI Gene ID 219473 (NCBI Reference Sequence: NP_001005202.1). In some embodiments, (wild type) OR10J5 has an amino acid sequence encoded by the nucleotide sequence of NCBI Gene ID 127385 (NCBI Reference Sequence: NP_001004469.1). In some embodiments, (wild type) OR1C1 has an amino acid sequence encoded by the nucleotide sequence of NCBI Gene ID 26188 (NCBI Reference Sequence: NP_036485.2). In some embodiments, (wild type) OR7D4 has an amino acid sequence encoded by the nucleotide sequence of NCBI Gene ID 125958 (NCBI Reference Sequence: NP_001005191.1). In some embodiments, (wild type) OR2T4 has an amino acid sequence encoded by the nucleotide sequence of NCBI Gene ID 127074 (NCBI Reference Sequence: NP_001004696.2). In some embodiments, (wild type) OR5B12 has an amino acid sequence encoded by the nucleotide sequence of NCBI Gene ID 390191 (NCBI Reference Sequence: NP_001004733.1). In some embodiments, (wild type) OR7A17 has an amino acid sequence encoded by the nucleotide sequence of NCBI Gene ID 26333 (NCBI Reference Sequence: NP_112163.1). In some embodiments, (wild type) OR10H5 has an amino acid sequence encoded by the nucleotide sequence of NCBI Gene ID 284433 (NCBI Reference Sequence: NP_001004466.1). In some embodiments, (wild type) OR5A2 has an amino acid sequence encoded by the nucleotide sequence of NCBI Gene ID 219981 (NCBI Reference Sequence: NP_001001954.1). In some embodiments, (wild type) OR5A1 has an amino acid sequence encoded by the nucleotide sequence of NCBI Gene ID 219982 (NCBI Reference Sequence: NP_001004728.1). In some embodiments, (wild type) OR1N2 has an amino acid sequence encoded by the nucleotide sequence of NCBI Gene ID 138882 (NCBI Reference Sequence: NP_001004457.2). In some embodiments, (wild type) OR2C1 has an amino acid sequence encoded by the nucleotide sequence of NCBI Gene ID 4993 (NCBI Reference Sequence: NP_036500.2). In some embodiments, (wild type) OR2T11 has an amino acid sequence encoded by the nucleotide sequence of NCBI Gene ID 127077 (NCBI Reference Sequence: NP_001001964.1). In some embodiments, (wild type) OR2M2 has an amino acid sequence encoded by the nucleotide sequence of NCBI Gene ID 391194 (NCBI Reference Sequence: NP_001004688.1). In some embodiments, (wild type) OR4S2 has an amino acid sequence encoded by the nucleotide sequence of NCBI Gene ID 219431 (NCBI Reference Sequence: NP_001004059.2). In some embodiments, (wild type) OR2L3 has an amino acid sequence encoded by the nucleotide sequence of NCBI Gene ID 391192 (NCBI Reference Sequence: NP_001004687.1). In some embodiments, (wild type) OR2AG2 has an amino acid sequence encoded by the nucleotide sequence of NCBI Gene ID 338755 (NCBI Reference Sequence: NP_001004490.1). In some embodiments, (wild type) OR7A5 has an amino acid sequence encoded by the nucleotide sequence of NCBI Gene ID 26659 (NCBI Reference Sequence: NP_001357409.1). In some embodiments, (wild type) OR7E24 has an amino acid sequence encoded by the nucleotide sequence of NCBI Gene ID 26648 (NCBI Reference Sequence: NP_001073404.1). In some embodiments, (wild type) OR7A10 has an amino acid sequence encoded by the nucleotide sequence of NCBI Gene ID 390892 (NCBI Reference Sequence: NP_001005190.1). In some embodiments, (wild type) OR10H2 has an amino acid sequence encoded by the nucleotide sequence of NCBI Gene ID 26538 (NCBI Reference Sequence: NP_039227.1). In some embodiments, (wild type) OR10H1 has an amino acid sequence encoded by the nucleotide sequence of NCBI Gene ID 26539 (NCBI Reference Sequence: NP_039228.1), In some embodiments, (wild type) OR10D3 has an amino acid sequence encoded by the nucleotide sequence of NCBI Gene ID 26497 (NCBI Reference Sequence: NP_001342142.1). In some embodiments, (wild type) OR1D2 has an amino acid sequence encoded by the nucleotide sequence of NCBI Gene ID 4991 (NCBI Reference Sequence: NP_001373017.1). In some embodiments, (wild type) OR2A5 has an amino acid sequence encoded by the nucleotide sequence of NCBI Gene ID 393046 (NCBI Reference Sequence: NP_036497.1). In some embodiments, (wild type) OR2A25 has an amino acid sequence encoded by the nucleotide sequence of NCBI Gene ID 392138 (NCBI Reference Sequence: NP_001004488.1). In some embodiments, (wild type) OR11G2 has an amino acid sequence encoded by the nucleotide sequence of NCBI Gene ID 390439 (NCBI Reference Sequence: NP_001005503.2). In some embodiments, (wild type) OR14J1 has an amino acid sequence encoded by the nucleotide sequence of NCBI Gene ID 442191 (NCBI Reference Sequence: NP_112208.1). In some embodiments, (wild type) OR5M3 has an amino acid sequence encoded by the nucleotide sequence of NCBI Gene ID 219482 (NCBI Reference Sequence: NP_001004742.2). In some embodiments, (wild type) OR8D1 has an amino acid sequence encoded by the nucleotide sequence of NCBI Gene ID 283159 (NCBI Reference Sequence: NP_001002917.1). In some embodiments, (wild type) OR10G3 has an amino acid sequence encoded by the nucleotide sequence of NCBI Gene ID 26533 (NCBI Reference Sequence: NP_001005465.1). In some embodiments, (wild type) OR10G9 has an amino acid sequence encoded by the nucleotide sequence of NCBI Gene ID 219870 (NCBI Reference Sequence: NP_001001953.1). In some embodiments, (wild type) OR2L5 has an amino acid sequence encoded by the nucleotide sequence of NCBI Gene ID 81466 (NCBI Reference Sequence: NP_001245213.1). In some embodiments, (wild type) OR8H1 has an amino acid sequence encoded by the nucleotide sequence of NCBI Gene ID 219469 (NCBI Reference Sequence: NP_0011005199.1). In some embodiments, (wild type) OR10K1 has an amino acid sequence encoded by the nucleotide sequence of NCBI Gene ID 391109 (NCBI Reference Sequence: NP_001004473.1). In some embodiments, (wild type) OR11A1 has an amino acid sequence encoded by the nucleotide sequence of NCBI Gene ID 26531 (NCBI Reference Sequence: NP_001381757.1). In some embodiments, (wild type) OR2V1 has an amino acid sequence encoded by the nucleotide sequence of NCBI Gene ID 26693 (NCB: Reference Sequence: NP_0011245212.1). In some embodiments, (wild type) OR5P3 has an amino acid sequence encoded by the nucleotide sequence of NCBI Gene ID 120066 (NCBI Reference Sequence: NP_703146.1). In some embodiments, (wild type) OR6P1 has an amino acid sequence encoded by the nucleotide sequence of NCBI Gene ID 128366 (NCBI Reference Sequence: NP_0011537971). In some embodiments, (wild type) OR2L2 has an amino acid sequence encoded by the nucleotide sequence of NCBI Gene ID 26246 (NCBI Reference Sequence: NP_001004686.1). In some embodiments, (wild type) OR10G7 has an amino acid sequence encoded by the nucleotide sequence of NCBI Gene ID 390265 (NCBI Reference Sequence: NP_0010044631). In some embodiments, (wild type) OR5AN1 has an amino acid sequence encoded by the nucleotide sequence of NCBI Gene ID 390195 (NCBI Reference Sequence: NP_01004729.1). In some embodiments, (wild type) OR5V1 has an amino acid sequence encoded by the nucleotide sequence of NCBI Gene ID 81696 (NCBI Reference Sequence: NP_110503 3). In some embodiments, (wild type) OR2AK2 has an amino acid sequence encoded by the nucleotide sequence of NCBI Gene ID 391191 (NCBI Reference Sequence: NP_001004491.2). In some embodiments, (wild type) OR10A3 has an amino acid sequence encoded by the nucleotide sequence of NCBI Gene ID 26496 (NCBI Reference Sequence NP_001003745.1). In some embodiments, (wild type) OR10A6 has an amino acid sequence encoded by the nucleotide sequence of NCBI Gene ID 390093 (NCBI Reference Sequence: NP_001004461.1). In some embodiments, (wild type) OR10J1 has an amino acid sequence encoded by the nucleotide sequence of NCBI Gene ID 26476 (NCBI Reference Sequence: NP_0001357486.1). In some embodiments, (wild type) OR2J2 has an amino acid sequence encoded by the nucleotide sequence of NCBI Gene ID 26707 (NCBI Reference Sequence: NP_112167.2). Major and functional alleles or haplotypes of these ORs were used herein.

[0170] In some embodiments, an olfactory receptor protein as described herein is a class I olfactory receptor having a modified C-terminal domain. In some embodiments, the class I receptor is selected from the group consisting of OR52A5, OR52E8, OR56A4, OR51B2, OR52K1, OR56A1, OR51B5, OR56A3, and OR51 L1, OR51B2 may preferably be OR51B2(C120R,L134F,C209S), OR52K1 may also be OR52K1(Q52R), OR51B5 may also be OR51B5(G5S), OR56A3 may also be OR56A3(M51T).

[0171] OR52A5, OR52E8, OR56A4, OR51B2, OR52K1, OR56A1, OR51B5, OR56A3, and OR51 L1 are human class I olfactory receptors. In some embodiments, (wild type) OR52A5 has an amino acid sequence encoded by the nucleotide sequence of NCBI Gene ID 390054 (NCBI Reference Sequence: NP_001005160.1). In some embodiments, (wild type) OR52E8 has an amino acid sequence encoded by the nucleotide sequence of NCBI Gene ID 390079 (NCBI Reference Sequence: NP_001005168.2). In some embodiments, (wild type) OR56A4 has an amino acid sequence encoded by the nucleotide sequence of NCBI Gene ID 120793 (NCBI Reference Sequence: NP_001005179.3). In some embodiments, (wild type) OR51B2 has an amino acid sequence encoded by the nucleotide sequence of NCBI Gene ID 79345 (NCBI Reference Sequence: NP 149420.4). In some embodiments, (wild type) OR52K1 has an amino acid sequence encoded by the nucleotide sequence of NCBI Gene ID 390036 (NCBI Reference Sequence: NP_001005171.2). In some embodiments, (wild type) OR56A1 has an amino acid sequence encoded by the nucleotide sequence of NCBI Gene ID 120796 (NCBI Reference Sequence: NP_001001917.3). In some embodiments, (wild type) OR51B5 has an amino acid sequence encoded by the nucleotide sequence of NCBI Gene ID 282763 (NCBI Reference Sequence: NP_001005567.2). In some embodiments, (wild type) OR56A3 has an amino acid sequence encoded by the nucleotide sequence of NCBI Gene ID 390083 (NCBI Reference Sequence: NP_001003443 2). In some embodiments, (wild type) OR51 L1 has an amino acid sequence encoded by the nucleotide sequence of NCBI Gene ID 119682 (NCBI Reference Sequence: NP_001004755.1).

[0172] As elaborated in the experimental section, the inventors have found that certain sequences corresponding with the sequence motif of SEQ ID NO: 1 are particularly advantageous. On that basis, a more preferred sequence motif has been identified. Accordingly, in preferred embodiments, an olfactory receptor protein as described herein is such that the sequence motif is:

(SEQ ID NO: 5)
RN[KR]E[VMI][KR]xA[LIV][KR][KR]L[LIF][KR][KR][KR].

[0173] The sequence motif:

(SEQ ID NO: 5)
RN[KR]E[VMI][KR]xA[LIV][KR][KR]L[LIF][KR][KR][KR]

may alternatively be described as: RNX₁EX_{3′}X₄X₅AX₆X_{7′}X₈LX₁₀X_{11′}X₁₂X₁₃ (SEQ ID NO: 5), wherein:
[0174] X₁ is K or R;
[0175] X_{3′} is V or M or 1;
[0176] X₄ is K or R;
[0177] X₅ is any amino acid;
[0178] X₆ is L or I or V;
[0179] X_{7′} is K or R;
[0180] X₈ is K or R;
[0181] X₁₀ is L or I or F;
[0182] X_{11′} is K or R;
[0183] X₁₂ is K or R; and
[0184] X₁₃ is K or R.

[0185] In some embodiments, an olfactory receptor protein as described herein is such that the sequence motif is: RN[KR]QIRxA[LIV][KRH][KR][LI][LIF][KRG][KR][KR] (SEQ ID NO: 824). The sequence motif RN[KR]QIRxA[LIV][KRH][KR][LI][LIF][KRG][KR][KR] (SEQ ID NO: 824) may alternatively be described as: RNX₁QIRX₅AX₆X₇X₈JX₁₀X₁₁X₁₂X₁₃ (SEQ ID NO: 824), wherein:
[0186] X₁ is K or R;
[0187] X₅ is any amino acid;
[0188] X₆ is L or I or V;
[0189] X₇ is K or R or H;
[0190] X₈ is K or R;
[0191] X₁₀ is L or I or F;
[0192] X₁₁ is K or R or G;
[0193] X₁₂ is K or R; and
[0194] X₁₃ is K or R.

[0195] A modified C-terminal domain comprising the motif of SEQ ID NO: 824 may be particularly advantageous in the case of Class I olfactory receptors.

[0196] The sequence motifs of SEQ ID NO: 1, SEQ ID NO: 5, and SEQ ID NO: 824 contain one residue which may be any amino acid, denoted as “x” or “X₅” herein above. The inventors have found that certain residues at this position yield particularly advantageous sequences. Accordingly, in further preferred embodiments, an olfactory receptor protein as described herein and having a modified C-terminal domain comprising any of the amino acid sequence motifs described above, is such that “x” or “X₅” is selected from any amino acid except proline (Pro, P).

[0197] In line with the above, in preferred embodiments, an olfactory receptor protein as described herein is such that the sequence motif is RN[KR][EDQ][VMIL][KR]{P}A[LIV][KRH][KR][LI][LIF][KRG][KR][KR] (SEQ ID NO: 311). The sequence motif

(SEQ ID NO: 311)
RN[KR][EDQ][VMIL][KR}{P}A[LIV][KRH][KR][LI][LIF]
[KRG][KR][KR]

[0198] may be alternatively described as:
[0199] RNX₁X₂X₃X₄X_{5″″}AX₆X₇X₃JX₁₀X₁₁X₁₂X₁₃ (SEQ ID NO: 311), wherein:
   [0200] X₁ is K or R;
   [0201] X₂ is E or D or Q
   [0202] X₃ is V or M or I or L;
   [0203] X₄ is K or R;
   [0204] X_{5″″} is D or K or E or N or R or V or A or Q or G or C or F or H or I or L or M or S or T or W or Y (any amino acid except P);
   [0205] X₆ is L or I or V;
   [0206] X₇ is K or R or H;
   [0207] X₈ is K or R;
   [0208] X₁₀ is L or I or F;
   [0209] X₁₁ is K or R or G;
   [0210] X₁₂ is K or R; and
   [0211] X₁₃ is K or R.

[0212] In other further preferred embodiments, an olfactory receptor as described herein is such that the sequence motif is:
[0213] RNX₁EX₃X₄X_{5″″}AX₆X_{7′}X₃LX₁₀X_{11′}X₁₂X₁₃ (SEQ ID NO: 312), wherein:
   [0214] X₁ is K or R;
   [0215] X_{3′} is V or M or 1;
   [0216] X₄ is K or R;
   [0217] X_{5″″} is D or K or E or N or R or V or A or Q or G or C or F or H or I or L or M or S or T or W or Y (any amino acid except P);
   [0218] X₆ is L or I or V;
   [0219] X_{7′} is K or R;
   [0220] X₈ is K or R;
   [0221] X₁₀ is L or I or F;
   [0222] X_{11′} is K or R;
   [0223] X₁₂ is K or R; and
   [0224] X₁₃ is K or R.

[0225] In some embodiments, an olfactory receptor protein as described herein and having a modified C-terminal domain comprising any of the amino acid sequence motifs described above, is such that “x” or “X₅” is selected from any amino acid except proline (Pro, P) and tryptophane (Trp, W).

[0226] In some embodiments, an olfactory receptor protein as described herein and having a modified C-terminal domain comprising any of the amino acid sequence motifs described above, is such that “x” or “X₅” is selected from D, K, R, E, N, V, A, Q, or G, preferably such that “x” or “X₅” is selected from D, K, R, E, N, V, A, or Q, more preferably such that “x” or “X₅” is selected from D, K, or R. In other words, in further preferred embodiments, an olfactory receptor protein as described herein is such that the sequence motif is:

(SEQ ID NO: 6)
RN[KR][EDQ][VMIL][KR][DKRENVAQG]A[LIV][KRH][KR]
[LI][LIF][KRG][KR][KR],

[0227] preferably:
[0228] RN[KR][EDQ][VMIL][KR][DKRENVAQ]A[LIV][KRH][KR][LI][LIF][KRG][KR][KR] (SEQ ID NO: 7), more referable:

(SEQ ID NO: 166)
RN[KR][EDQ][VMIL][KR][DKR]A[LIV][KRH][KR][LI]
[LIF][KRG][KR][KR];

[0229] or the sequence motif is:
[0230] RN[KR]E[VMI][KR][DKRENVAQG]A[LIV][KR][KR]L[LIF][KR][KR][KR] (SEQ ID NO: 8), preferably:
[0231] RN[KR]E[VMI][KR][DKRENVAQ]A[LIV][KR][KR]L[LIF][KR][KR][KR] (SEQ ID NO: 9), more preferably:
[0232] RN[KR]E[VMI][KR][DKR]A[LIV][KR][KR]L[LIF][KR][KR][KR] (SEQ ID NO: 167).

[0233] In some embodiments, an olfactory receptor protein as described herein is such that the sequence motif is:

(SEQ ID NO: 820)
RN[KR][EDQ][VMIL][KR]KA[LIV][KRH][KR][LI][LIF][KRG][KR][KR]

[0234] The sequence motif RN[KR][EDQ][VMIL][KR]KA[LIV][KRH][KR][LI][LIF][KRG][KR][KR] (SEQ ID NO: 820) may alternatively be described as RNX₁X₂X₃X₄KAX₆X₇X₈JX₁₀X₁₁X₁₂X₁₃ (SEQ ID NO: 820), wherein:
[0235] X₁ is K or R;
[0236] X₂ is E or D or Q;
[0237] X₃ is V or M or I or L;
[0238] X₄ is K or R;
[0239] X₆ is L or I or V;
[0240] X₇ is K or R or H;
[0241] X₈ is K or R;
[0242] X₁₀ is L or I or F;
[0243] X₁₁ is K or R or G;
[0244] X₁₂ is K or R; and
[0245] X₁₃ is K or R.

[0246] In some embodiments, an olfactory receptor protein as described herein is such that the sequence motif is:

(SEQ ID NO: 821)
RN[KR]E[VMI][KR]KA[LIV][KR][KR]L[LIF][KR][KR][KR].

[0247] The sequence motif:

(SEQ ID NO: 821)
RN[KR]E[VMI][KR]KA[LIV][KR][KR]L[LIF][KR][KR][KR]

may alternatively be described as:
[0248] RNX₁EX₃X₄KAX₆X_{7′}X₈LX₁₀X_{11′}X₁₂X₁₃ (SEQ ID NO: 821), wherein:
   [0249] X₁ is K or R;
   [0250] X_{3′} is V or M or 1;
   [0251] X₄ is K or R;
   [0252] X₅ is any amino acid;
   [0253] X₆ is L or I or V;
   [0254] X_{7′} is K or R;
   [0255] X₈ is K or R;
   [0256] X₁₀ is L or I or F;
   [0257] X_{11′} is K or R;
   [0258] X₁₂ is K or R; and
   [0259] X₁₃ is K or R.

[0260] In some embodiments, an olfactory receptor protein as described herein is such that the sequence motif is: RNKEVKX_{5″″}ALKRLLKRK (SEQ ID NO: 319), wherein:
[0261] X_{5″″} is D or K or E or N or R or V or A or Q or G or C or F or H or I or L or M or S or T or W or Y.

[0262] Several specific and particularly advantageous sequences corresponding with the sequence motifs described herein have been identified. Accordingly, in some embodiments, an olfactory receptor protein as described herein is such that the sequence motif is selected from the group consisting of:

(SEQ ID NO: 10)
RNKEVKDALKRLLKRK,
(SEQ ID NO: 11)
RNREVKDALKRLLKRK,
(SEQ ID NO: 12)
RNKEIKDALKRLLKRK,
(SEQ ID NO: 13)
RNKEMKDALKRLLKRK,
(SEQ ID NO: 14)
RNKEVRDALKRLLKRK,
(SEQ ID NO: 15)
RNKEVKKALKRLLKRK,
(SEQ ID NO: 16)
RNKEVKEALKRLLKRK,
(SEQ ID NO: 17)
RNKEVKNALKRLLKRK,
(SEQ ID NO: 18)
RNKEVKRALKRLLKRK,
(SEQ ID NO: 19)
RNKEVKVALKRLLKRK,
(SEQ ID NO: 20)
RNKEVKAALKRLLKRK,
(SEQ ID NO: 21)
RNKEVKQALKRLLKRK,
(SEQ ID NO: 22)
RNKEVKDAVKRLLKRK,
(SEQ ID NO: 23)
RNKEVKDAIKRLLKRK,
(SEQ ID NO: 24)
RNKEVKDALRRLLKRK,
(SEQ ID NO: 25)
RNKEVKDALKKLLKRK,
(SEQ ID NO: 26)
RNKEVKDALKRLIKRK,
(SEQ ID NO: 27)
RNKEVKDALKRLFKRK,
(SEQ ID NO: 28)
RNKEVKDALKRLLRRK,
(SEQ ID NO: 29)
RNKEVKDALKRLLKKK,
(SEQ ID NO: 30)
RNKEVKDALKRLLKRR,
(SEQ ID NO: 31)
RNKDVKDALKRLLKRK,
(SEQ ID NO: 32)
RNKQVKDALKRLLKRK,
(SEQ ID NO: 33)
RNKELKDALKRLLKRK,
(SEQ ID NO: 34)
RNKEVKGALKRLLKRK,
(SEQ ID NO: 35)
RNKEVKDALHRLLKRK,
(SEQ ID NO: 36)
RNKEVKDALKRILKRK,
(SEQ ID NO: 37)
RNKEVKDALKRLLGRK,
(SEQ ID NO: 38)
RNKEVKRAIKRLLKRK,
(SEQ ID NO: 39)
RNKEVKKAIKRLLKRK,
(SEQ ID NO: 40)
RNKEVKRAIKRLFKRK,
(SEQ ID NO: 41)
RNKEVKKAIKRLFKRK,
(SEQ ID NO: 42)
RNKEVKRAIRKLLKRK,
(SEQ ID NO: 43)
RNKEVKDALRKLLKRK,
(SEQ ID NO: 44)
RNKEVKDALKRLLRRR,
(SEQ ID NO: 827)
RNREMRKALHRLLGKK,
(SEQ ID NO: 828)
RNREVKKAIHKLIGRK,
(SEQ ID NO: 829)
RNREVRKAVHRLFKRK,
(SEQ ID NO: 830)
RNKEMKKAIHKLFGKK,
(SEQ ID NO: 831)
RNRDVKKAVHKLFRRK,
(SEQ ID NO: 832)
RNRDMKKAVHKLFGKR,
(SEQ ID NO: 833)
RNKELRKALHKLLGRK,
(SEQ ID NO: 834)
RNRDVRKALRRILRRR,
(SEQ ID NO: 835)
RNKDVRKAVRKLIRRR,
(SEQ ID NO: 836)
RNRDVRKAVRRLFRKR,
(SEQ ID NO: 837)
RNKDIKKAVKKLIKKK,
(SEQ ID NO: 838)
RNRELRKAVRRLFKRR,
(SEQ ID NO: 839)
RNKELRKAVRKIIKKK,
(SEQ ID NO: 840)
RNRDVKKAVRRLFRRK,
(SEQ ID NO: 841)
RNREVRKALRRIIRKR,
(SEQ ID NO: 842)
RNKDIRKAVKKIFRRK,
(SEQ ID NO: 843)
RNKDVRKAVRRLIKRK,
(SEQ ID NO: 844)
RNRDLRKAVRKLFKKK,
(SEQ ID NO: 845)
RNRDLRKALRRIFKRR,
(SEQ ID NO: 846)
RNRDVRKAIKKLIRKR,
(SEQ ID NO: 847)
RNKELKKAIKRILKKK,
(SEQ ID NO: 848)
RNRDVRKAIRKLLKRK,
(SEQ ID NO: 849)
RNRDLRKAVRRIFKKR,
(SEQ ID NO: 850)
RNRDVRKAVRKLFKRR,
(SEQ ID NO: 851)
RNRDVRKALRRLFKKR,
(SEQ ID NO: 852)
RNKELKKALRKLIGKK,
(SEQ ID NO: 853)
RNREMRKAIKKIIKKK,
(SEQ ID NO: 854)
RNKEIKKAIKKIIKKR,
(SEQ ID NO: 855)
RNRDVKKAIRRLFRRR,
(SEQ ID NO: 856)
RNREVKKAVKKLIGKR,
(SEQ ID NO: 857)
RNREMRKALRRLFRKR,
(SEQ ID NO: 858)
RNKELKKALRRLIGRR,
(SEQ ID NO: 859)
RNRDVKKALRKLIGKR,
(SEQ ID NO: 860)
RNREVKKAVKKLIRRK,
(SEQ ID NO: 861)
RNKEVRKALKKLFGKK,
(SEQ ID NO: 862)
RNKEIRKALRRLFGKK,
(SEQ ID NO: 863)
RNKDVKKALRRLFGKK,
(SEQ ID NO: 864)
RNKELKKAIKRLIRRK,
(SEQ ID NO: 865)
RNKDVRKAVKRLLKKR,
(SEQ ID NO: 866)
RNKELRKAIRRLLRRR,
(SEQ ID NO: 867)
RNRDIRKALRKLFKKK,
(SEQ ID NO: 868)
RNRELKKALRRLLRRR,
(SEQ ID NO: 869)
RNREVKKALRRLFGKK,
(SEQ ID NO: 870)
RNRDVRKALKRLLKRK,
(SEQ ID NO: 871)
RNRDMRKAIRKLFGRK,
(SEQ ID NO: 872)
RNRELKKAIRKLLKRK,
(SEQ ID NO: 873)
RNRDIRKAVKKLFGKK,
(SEQ ID NO: 874)
RNKEVKKAIRKLFGRR,
(SEQ ID NO: 875)
RNREVRKAVRKLFRRK,
(SEQ ID NO: 876)
RNRDMKKALKKLFRRR,
(SEQ ID NO: 877)
RNRDVRKALKRLLGRR,
(SEQ ID NO: 878)
RNKDLKKAVKKLFGRK,
(SEQ ID NO: 879)
RNKDVRKAVRRLFGRR,
(SEQ ID NO: 880)
RNKEVKCALKRLLKRK,
(SEQ ID NO: 881)
RNKEVKFALKRLLKRK,
(SEQ ID NO: 882)
RNKEVKHALKRLLKRK,
(SEQ ID NO: 883)
RNKEVKIALKRLLKRK,
(SEQ ID NO: 884)
RNKEVKLALKRLLKRK,
(SEQ ID NO: 885)
RNKEVKMALKRLLKRK,
(SEQ ID NO: 886)
RNKEVKSALKRLLKRK,
(SEQ ID NO: 887)
RNKEVKTALKRLLKRK,
(SEQ ID NO: 888)
RNKEVKWALKRLLKRK,
and
(SEQ ID NO: 889)
RNKEVKYALKRLLKRK.

[0263] Olfactory receptors having a modified C-terminal domain comprising any of these specific sequences listed above have been shown to display advantageous and surprising technical effects, as described in detail in the experimental section of this disclosure. Based on these insights, the skilled person can design further advantageous sequences correspondingly fitting within the sequence motifs described herein. Some illustrative and non-limiting examples of such sequences are the following:

(SEQ ID NO: 45)
RNKEVKRALKRLLRRR
(SEQ ID NO: 46)
RNKEVKKALKRLLRRR
(SEQ ID NO: 47)
RNREVKRAIKRLLKRK
(SEQ ID NO: 48)
RNREVKKAIKRLLKRK
(SEQ ID NO: 49)
RNREVKRAIKRLFKRK
(SEQ ID NO: 50)
RNREVKKAIKRLFKRK
(SEQ ID NO: 51)
RNREVKRAIRKLLKRK
(SEQ ID NO: 52)
RNREVKDALRKLLKRK
(SEQ ID NO: 53)
RNREVKDALKRLLRRR
(SEQ ID NO: 54)
RNKEVKKAIKRLLRRK
(SEQ ID NO: 55)
RNKEVKKAIKRLLKKK
(SEQ ID NO: 56)
RNKEVKKAIKRLLKRR
(SEQ ID NO: 57)
RNKEVKRAIKRLLRRK
(SEQ ID NO: 58)
RNKEVKRAIKRLLKKK
(SEQ ID NO: 59)
RNKEVKRAIKRLLKRR
(SEQ ID NO: 60)
RNKEVKKAIKRLFRRK
(SEQ ID NO: 61)
RNKEVKKAIKRLFKKK
(SEQ ID NO: 62)
RNKEVKKAIKRLFKRR
(SEQ ID NO: 63)
RNKEVKRAIKRLFRRK
(SEQ ID NO: 64)
RNKEVKRAIKRLFKKK
(SEQ ID NO: 65)
RNKEVKRAIKRLFKRR
(SEQ ID NO: 66)
RNREVKRAIKRLLRKK
(SEQ ID NO: 67)
RNREVKKAIKRLLRKK
(SEQ ID NO: 68)
RNREVKRAIKRLFRRR
(SEQ ID NO: 69)
RNREVKKAIKRLFRRR
(SEQ ID NO: 70)
RNREVKKAIKRLFRRK
(SEQ ID NO: 71)
RNREVKKAIKRLFKKK
(SEQ ID NO: 72)
RNREVKKAIKRLFKRR
(SEQ ID NO: 73)
RNREVKRAIKRLFRRK
(SEQ ID NO: 74)
RNREVKRAIKRLFKKK
(SEQ ID NO: 75)
RNREVKRAIKRLFKRR

[0264] In some embodiments, an olfactory receptor protein as described herein is such that the sequence motif is RNRDVRKALRRLFRKK (SEQ ID NO: 307) or RNRDVRRALRRLFRKK (SEQ ID NO: 308). Such C-terminal motifs may be particularly advantageous as they comprise stastically optimal amino acids at each individual position.

[0265] In some embodiments, an olfactory receptor protein as described herein is such that the sequence motif is RNKQIRDALKRLLKRK (SEQ ID NO: 890). Such a C-terminal motif may be particularly advantageous in the case of class I olfactory receptors.

[0266] The 16 amino acid long sequence motifs described herein may optionally comprise additional C-terminal residues. Indeed, the inventors have found that, while not being essential, such additional C-terminal residues may lead to further advantegeous effects, as described in detail in the Experimental section. The number of additional C-terminal residues, if present, is not particularly limited, but it is preferably less than 10. More preferably, the number of additional C-terminal residues, if present, is from 1 to 6. Thus, depending on the number of additional C-terminal residues that are added to the 16 amino acid long sequence motifs described herein, the total length of the sequence motif described herein may be 17, 18, 19, 20, 21, 22, 23, 24, 25, or 26 amino acids, preferably 17, 18, 19, 20, 21, or 22 amino acids, when optional additional C-terminal residues are present.

[0267] Accordingly, in some embodiments, an olfactory receptor protein as described herein is such that the amino acid sequence motif comprises 1 to 10, preferably 1 to 6, additional C-terminal amino acid residues. In some embodiments, the additional C-terminal amino acid residues are as follows:
[0268] the first additional amino acid residue is selected from C, R, K, E, G, H, F, P, Y, W, M, and N, preferably the first additional amino acid residue is selected from C, R, K, E, G, H, F, P, and Y, more preferably the first additional amino acid residue is C, R, or K, most preferably the first additional amino acid residue is C;
[0269] the second additional amino acid residue is selected from C, R, K, N, G, I, L, F, P, T, Y, and Q, preferably the second additional amino acid residue is selected from C, R, K, N, G, I, L, F, P, T, and Y, more preferably the second additional amino acid residue is C, R, or K, most preferably the second additional amino acid residue is C or R;
[0270] the third additional amino acid residue is selected from R, K, C, L, F, M, Y, A, P, S, G, H, and N, preferably the third additional amino acid residue is selected from R, K, C, L, F, M, Y, A, P, S, and G, more preferably the third additional amino acid residue is R or K;
[0271] the fourth to tenth, or the fourth, fifth and sixth, preferably the fourth, fifth, and sixth, additional amino acid residues are selected from K and R.

[0272] In some embodiments, the amino acid sequence motif comprises 1 additional C-terminal residue. The additional amino acid residue preferably corresponds to the first additional amino acid residue as defined above, more preferably is selected from C, R, P, L, K, G, Y, F, M, or W.

[0273] In some embodiments, the amino acid sequence motif comprises 2 additional C-terminal residues. The first and second additional amino acid residue are preferably as defined above. Specific advantageous examples of combinations of a first and second additional amino acid residue include CC, SI, YP, PQ, FR, CR, RR, EK, PR, CG, FK, RG, RC, RT, RF, GG, YR, GC, TG, PC, HP, PG, KY, CP, YY, FF, CF, NP, YL, IC, HC, CL, YC, ER, RP, PA, FC, and RY. Particularly preferred in this context is a CC sequence.

[0274] Therefore, in some embodiments, an olfactory receptor protein as described herein is such that the sequence motif is selected from the group consisting of:
[0275] RNX₁X₂X₃X₄KAX₆X₇X₈JX₁₀X₁₁X₁₂X₁₃CC (SEQ ID NO: 822),
[0276] RNX₁EX_{3′}X₄KAX₆X_{7′}X₈LX₁₀X_{11′}X₁₂X₁₃CC (SEQ ID NO: 823), and;
[0277] RNKEVKX_{5″″}ALKRLLKRKCC (SEQ ID NO: 320), wherein:
[0278] X₁ is K or R;
[0279] X₂ is E or D or Q;
[0280] X₃ is V or M or I or L;
[0281] X_{3′} is V or M or 1;
[0282] X₄ is K or R;
[0283] X_{5″″} is D or K or E or N or R or V or A or Q or G or C or F or H or I or L or M or S or T or W or Y;
[0284] X₆ is L or I or V;
[0285] X₇ is K or R or H;
[0286] X_{7′} is K or R;
[0287] X₃ is K or R;
[0288] X₁₀ is L or I or F;
[0289] X₁₁ is K or R or G;
[0290] X_{11′} is K or R;
[0291] X₁₂ is K or R; and
[0292] X₁₃ is K or R.

[0293] In some embodiments, an olfactory receptor protein as described herein is such that the sequence motif is selected from the group consisting of:

(SEQ ID NO: 86)
RNKEVKDALKRLLKRKCC,
(SEQ ID NO: 87)
RNREVKDALKRLLKRKCC,
(SEQ ID NO: 88)
RNKEIKDALKRLLKRKCC,
(SEQ ID NO: 89)
RNKEMKDALKRLLKRKCC,
(SEQ ID NO: 90)
RNKEVRDALKRLLKRKCC,
(SEQ ID NO: 91)
RNKEVKKALKRLLKRKCC,
(SEQ ID NO: 92)
RNKEVKEALKRLLKRKCC,
(SEQ ID NO: 93)
RNKEVKNALKRLLKRKCC,
(SEQ ID NO: 94)
RNKEVKRALKRLLKRKCC,
(SEQ ID NO: 95)
RNKEVKVALKRLLKRKCC,
(SEQ ID NO: 96)
RNKEVKAALKRLLKRKCC,
(SEQ ID NO: 97)
RNKEVKQALKRLLKRKCC,
(SEQ ID NO: 98)
RNKEVKDAVKRLLKRKCC,
(SEQ ID NO: 99)
RNKEVKDAIKRLLKRKCC,
(SEQ ID NO: 100)
RNKEVKDALRRLLKRKCC,
(SEQ ID NO: 101)
RNKEVKDALKKLLKRKCC,
(SEQ ID NO: 102)
RNKEVKDALKRLIKRKCC,
(SEQ ID NO: 103)
RNKEVKDALKRLFKRKCC,
(SEQ ID NO: 104)
RNKEVKDALKRLLRRKCC,
(SEQ ID NO: 105)
RNKEVKDALKRLLKKKCC,
(SEQ ID NO: 106)
RNKEVKDALKRLLKRRCC,
(SEQ ID NO: 107)
RNKDVKDALKRLLKRKCC,
(SEQ ID NO: 108)
RNKQVKDALKRLLKRKCC,
(SEQ ID NO: 109)
RNKELKDALKRLLKRKCC,
(SEQ ID NO: 110)
RNKEVKGALKRLLKRKCC,
(SEQ ID NO: 111)
RNKEVKDALHRLLKRKCC,
(SEQ ID NO: 112)
RNKEVKDALKRILKRKCC,
(SEQ ID NO: 113)
RNKEVKDALKRLLGRKCC,
(SEQ ID NO: 114)
RNKEVKRAIKRLLKRKCC,
(SEQ ID NO: 115)
RNKEVKKAIKRLLKRKCC,
(SEQ ID NO: 116)
RNKEVKRAIKRLFKRKCC,
(SEQ ID NO: 117)
RNKEVKKAIKRLFKRKCC,
(SEQ ID NO: 118)
RNKEVKRAIRKLLKRKCC,
(SEQ ID NO: 119)
RNKEVKDALRKLLKRKCC,
(SEQ ID NO: 120)
RNKEVKDALKRLLRRRCC,
(SEQ ID NO: 254)
RNREMRKALHRLLGKKCC,
(SEQ ID NO: 255)
RNREVKKAIHKLIGRKCC,
(SEQ ID NO: 256)
RNREVRKAVHRLFKRKCC,
(SEQ ID NO: 257)
RNKEMKKAIHKLFGKKCC,
(SEQ ID NO: 258)
RNRDVKKAVHKLFRRKCC,
(SEQ ID NO: 259)
RNRDMKKAVHKLFGKRCC,
(SEQ ID NO: 260)
RNKELRKALHKLLGRKCC,
(SEQ ID NO: 261)
RNRDVRKALRRILRRRCC,
(SEQ ID NO: 262)
RNKDVRKAVRKLIRRRCC,
(SEQ ID NO: 263)
RNRDVRKAVRRLFRKRCC,
(SEQ ID NO: 264)
RNKDIKKAVKKLIKKKCC,
(SEQ ID NO: 265)
RNRELRKAVRRLFKRRCC,
(SEQ ID NO: 266)
RNKELRKAVRKIIKKKCC,
(SEQ ID NO: 267)
RNRDVKKAVRRLFRRKCC,
(SEQ ID NO: 268)
RNREVRKALRRIIRKRCC,
(SEQ ID NO: 269)
RNKDIRKAVKKIFRRKCC,
(SEQ ID NO: 270)
RNKDVRKAVRRLIKRKCC,
(SEQ ID NO: 271)
RNRDLRKAVRKLFKKKCC,
(SEQ ID NO: 272)
RNRDLRKALRRIFKRRCC,
(SEQ ID NO: 273)
RNRDVRKAIKKLIRKRCC,
(SEQ ID NO: 274)
RNKELKKAIKRILKKKCC,
(SEQ ID NO: 275)
RNRDVRKAIRKLLKRKCC,
(SEQ ID NO: 276)
RNRDLRKAVRRIFKKRCC,
(SEQ ID NO: 277)
RNRDVRKAVRKLFKRRCC,
(SEQ ID NO: 278)
RNRDVRKALRRLFKKRCC,
(SEQ ID NO: 279)
RNKELKKALRKLIGKKCC,
(SEQ ID NO: 280)
RNREMRKAIKKIIKKKCC,
(SEQ ID NO: 281)
RNKEIKKAIKKIIKKRCC,
(SEQ ID NO: 282)
RNRDVKKAIRRLFRRRCC,
(SEQ ID NO: 283)
RNREVKKAVKKLIGKRCC,
(SEQ ID NO: 284)
RNREMRKALRRLFRKRCC,
(SEQ ID NO: 285)
RNKELKKALRRLIGRRCC,
(SEQ ID NO: 286)
RNRDVKKALRKLIGKRCC,
(SEQ ID NO: 287)
RNREVKKAVKKLIRRKCC,
(SEQ ID NO: 288)
RNKEVRKALKKLFGKKCC,
(SEQ ID NO: 289)
RNKEIRKALRRLFGKKCC,
(SEQ ID NO: 290)
RNKDVKKALRRLFGKKCC,
(SEQ ID NO: 291)
RNKELKKAIKRLIRRKCC,
(SEQ ID NO: 292)
RNKDVRKAVKRLLKKRCC,
(SEQ ID NO: 293)
RNKELRKAIRRLLRRRCC,
(SEQ ID NO: 294)
RNRDIRKALRKLFKKKCC,
(SEQ ID NO: 295)
RNRELKKALRRLLRRRCC,
(SEQ ID NO: 296)
RNREVKKALRRLFGKKCC,
(SEQ ID NO: 297)
RNRDVRKALKRLLKRKCC,
(SEQ ID NO: 298)
RNRDMRKAIRKLFGRKCC,
(SEQ ID NO: 299)
RNRELKKAIRKLLKRKCC,
(SEQ ID NO: 300)
RNRDIRKAVKKLFGKKCC,
(SEQ ID NO: 301)
RNKEVKKAIRKLFGRRCC,
(SEQ ID NO: 302)
RNREVRKAVRKLFRRKCC,
(SEQ ID NO: 303)
RNRDMKKALKKLFRRRCC,
(SEQ ID NO: 304)
RNRDVRKALKRLLGRRCC,
(SEQ ID NO: 305)
RNKDLKKAVKKLFGRKCC,
(SEQ ID NO: 306)
RNKDVRKAVRRLFGRRCC,
(SEQ ID NO: 309)
RNRDVRKALRRLFRKKCC,
(SEQ ID NO: 310)
RNRDVRRALRRLFRKKCC,
(SEQ ID NO: 321)
RNKEVKCALKRLLKRKCC,
(SEQ ID NO: 322)
RNKEVKFALKRLLKRKCC,
(SEQ ID NO: 323)
RNKEVKHALKRLLKRKCC,
(SEQ ID NO: 324)
RNKEVKIALKRLLKRKCC,
(SEQ ID NO: 325)
RNKEVKLALKRLLKRKCC,
(SEQ ID NO: 326)
RNKEVKMALKRLLKRKCC,
(SEQ ID NO: 328)
RNKEVKSALKRLLKRKCC,
(SEQ ID NO: 329)
RNKEVKTALKRLLKRKCC,
(SEQ ID NO: 330)
RNKEVKWALKRLLKRKCC,
(SEQ ID NO: 331)
RNKEVKYALKRLLKRKCC,
and
(SEQ ID NO: 740)
RNKQIRDALKRLLKRKCC.

[0294] C-terminal motifs having the sequence RNRDVRKALRRLFRKKCC (SEQ ID NO: 309) or RNRDVRRALRRLFRKKCC (SEQ ID NO: 310), may be particularly advantageous as they comprise statistically optimal amino acids at each individual position. A C-terminal motif having the sequence RNKQIRDALKRLLKRKCC (SEQ ID NO: 740) may be particularly advantageous in the case of class I olfactory receptors.

[0295] In addition to a CC sequence, other preferred combinations of a first and second additional amino acid residue are CR, RR, YP, RF and FK. Accordingly, in some embodiments, an olfactory receptor protein as described herein is such that the sequence motif is selected from the group consisting of:

(SEQ ID NO: 121)
RNKEVKRAIKRLLKRKCR,
(SEQ ID NO: 122)
RNKEVKKAIKRLLKRKCR,
(SEQ ID NO: 123)
RNKEVKRALKRLLKRKRR,
(SEQ ID NO: 124)
RNKEVKRALKRLLKRKYP,
(SEQ ID NO: 125)
RNKEVKRALKRLLKRKRF,
(SEQ ID NO: 126)
RNKEVKRALKRLLKRKFK,
(SEQ ID NO: 127)
RNKEVKKALKRLLKRKRR,
(SEQ ID NO: 128)
RNKEVKKALKRLLKRKYP,
(SEQ ID NO: 129)
RNKEVKKALKRLLKRKRF,
and
(SEQ ID NO: 130)
RNKEVKKALKRLLKRKFK.

[0296] In some embodiments, the amino acid sequence motif comprises 3 additional C-terminal residues. The first and second and third additional amino acid residue are preferably as defined above. In some embodiments, the first and second additional amino acid residues are CC and the third additional amino acid residue is as defined above. Specific advantageous examples of combinations of a first and second and third additional amino acid residue include CRR, CCC, CCF, CCL, CCM, CCS, CCP, CCA, CCY, CCH, CCN, CCD, CCK, CCR and CCG.

[0297] Accordingly, in some embodiments, an olfactory receptor protein as described herein is such that the sequence motif is selected from the group consisting of:

(SEQ ID NO: 133)
RNKEVKDALKRLLKRKCRR,
(SEQ ID NO: 134)
RNKEVKDALKRLLKRKCCC,
(SEQ ID NO: 135)
RNKEVKDALKRLLKRKCCF,
(SEQ ID NO: 136)
RNKEVKDALKRLLKRKCCL,
(SEQ ID NO: 137)
RNKEVKDALKRLLKRKCCM,
(SEQ ID NO: 138)
RNKEVKDALKRLLKRKCCS,
(SEQ ID NO: 139)
RNKEVKDALKRLLKRKCCP,
(SEQ ID NO: 140)
RNKEVKDALKRLLKRKCCA,
(SEQ ID NO: 141)
RNKEVKDALKRLLKRKCCY,
(SEQ ID NO: 142)
RNKEVKDALKRLLKRKCCH,
(SEQ ID NO: 143)
RNKEVKDALKRLLKRKCCN,
(SEQ ID NO: 144)
RNKEVKDALKRLLKRKCCD,
(SEQ ID NO: 145)
RNKEVKDALKRLLKRKCCK,
(SEQ ID NO: 146)
RNKEVKDALKRLLKRKCCR,
and
(SEQ ID NO: 147)
RNKEVKDALKRLLKRKCCG.

[0298] In some embodiments, the amino acid sequence motif comprises 4 additional C-terminal residues. The first and second and third and fourth additional amino acid residue are preferably as defined above. Specific advantageous examples of combinations of a first and second and third and fourth additional amino acid residue include CRRR (SEQ ID NO: 159), CRKK (SEQ ID NO: 160), CCRR (SEQ ID NO: 161), CCRK (SEQ ID NO: 228), and CCKR (SEQ ID NO: 229), among which CRRR (SEQ ID NO: 159), CRKK (SEQ ID NO: 160), and CCRR (SEQ ID NO: 161) are preferred. Accordingly, in some embodiments, an olfactory receptor protein as described herein is such that the sequence motif is selected from the group consisting of:

(SEQ ID NO: 149)
RNKEVKDALKRLLKRKCRRR,
(SEQ ID NO: 150)
RNKEVKDALKRLLKRKCRKK,
and
(SEQ ID NO: 151)
RNKEVKDALKRLLKRKCCRR.

[0299] In some embodiments, the amino acid sequence motif comprises 5 additional C-terminal residues. The first and second and third and fourth and fifth additional amino acid residue are preferably as defined above. Specific advantageous examples of a combination of first and second and third and fourth and fifth additional amino acid residue include CRRRR (SEQ ID NO: 162), CCRRR (SEQ ID NO: 163). CCKRR (SEQ ID NO: 230), CCRKR (SEQ ID NO: 231), CCRRK (SEQ ID NO: 232), CCRKK (SEQ ID NO: 233), CCKRK (SEQ ID NO: 234), CCKKR (SEQ ID NO: 235), and CCKKK (SEQ ID NO: 236), among which CRRRR (SEQ ID NO: 162) and CCRRR (SEQ ID NO: 163) are preferred.

[0300] In some embodiments, an olfactory receptor protein as described herein is such that the sequence motif is selected from the group consisting of:
[0301] RNX₁X₂X₃X₄X₅AX₆X₇X₈JX₁₀X₁₁X₁₂X₁₃CCRRR (SEQ ID NO: 825), and
[0302] RNX₁QIRX₅AX₆X₇X₈JX₁₀X₁₁X₁₂X₁₃CCRRR (SEQ ID NO: 826), wherein:
   [0303] X₁ is K or R;
   [0304] X₂ is E or D or Q;
   [0305] X₃ is V or M or I or L;
   [0306] X₄ is K or R;
   [0307] X₅ is any amino acid;
   [0308] X₆ is L or I or V;
   [0309] X₇ is K or R or H;
   [0310] X₈ is K or R;
   [0311] X₁₀ is L or I or F;
   [0312] X₁₁ is K or R or G;
   [0313] X₁₂ is K or R; and
   [0314] X₁₃ is K or R.

[0315] Preferably, X₅ is any amino acid except proline (Pro, P).

[0316] In some embodiments, an olfactory receptor protein as described herein is such that the sequence motif is selected from the group consisting of:

(SEQ ID NO: 154)
RNKEVKDALKRLLKRKCRRRR,
(SEQ ID NO: 156)
RNKEVKDALKRLLKRKCCRRR,
(SEQ ID NO: 220)
RNKEVKKAIKRLLKRKCCRRR,
(SEQ ID NO: 237)
RNKEVKRAIKRLLKRKCCRRR,
(SEQ ID NO: 221)
RNKEVKKAIKRLFKRKCCRRR,
(SEQ ID NO: 238)
RNKEVKRAIKRLFKRKCCRRR,
and
(SEQ ID NO: 741)
RNKQIRDALKRLLKRKCCRRR,

preferably the sequence motif is RNKEVKKAIKRLFKRKCCRRR (SEQ ID NO: 221).

[0317] A C-terminal motif having the sequence RNKQIRDALKRLLKRKCCRRR (SEQ ID NO: 741) may be particularly advantageous in the case of class I olfactory receptors.

[0318] In some embodiments, the amino acid sequence motif comprises 6 additional C-terminal residues. The first and second and third and fourth and fifth and sixth additional amino acid residue are preferably as defined above. Specific advantageous examples of combinations of a first and second and third and fourth and fifth and sixth additional amino acid residue include CRRRRR (SEQ ID NO: 164), CRRRKK (SEQ ID NO: 165), and CCRRRR (SEQ ID NO: 224).

[0319] Accordingly, in some embodiments, an olfactory receptor protein as described herein is such that the sequence motif is selected from the group consisting of:

(SEQ ID NO: 157)
RNKEVKDALKRLLKRKCRRRRR,
(SEQ ID NO: 158)
RNKEVKDALKRLLKRKCRRRKK,
and
(SEQ ID NO: 219)
RNKEVKDALKRLLKRKCCRRRR.

[0320] Olfactory receptors having a modified C-terminal domain comprising any of these specific sequences of listed above have been shown to display advantageous and surprising technical effects, as described in detail in the experimental section of this disclosure.

[0321] In some embodiments, an olfactory receptor protein as described herein may be such that the amino acid sequence motif comprises additional C-terminal amino acid residues selected from the group consisting of CC, CCR, CCRR (SEQ ID NO: 161), CCRRR (SEQ ID NO: 163), CCRRRR (SEQ ID NO: 224), CR, CRR, CRRR (SEQ ID NO: 159), CRKK (SEQ ID NO: 160), CRRRR (SEQ ID NO: 162), CRRRRR (SEQ ID NO: 164), CRRRKK (SEQ ID NO: 165).

[0322] In some embodiments, an olfactory receptor as described herein further comprises an N-terminal signal peptide. Typically, the N-terminal signal peptide is a cleavable peptide. This means that it is cleaved from the mature protein and cannot alter OR-ligand binding and signaling. Thus, it is understood by the skilled person that the N-terminal signal peptides described herein are usually not a part of the mature olfactory receptor. In some embodiments, the N-terminal signal peptide is a leucine-rich signal peptide, preferably MRPQILLLLALLTLGLA (SEQ ID NO: 76) or MSHQILLLLALLTLGLA (SEQ ID NO: 77). MRPQILLLLALLTLGLA (SEQ ID NO: 76) and MSHQILLLLALLTLGLA (SEQ ID NO: 77) are known as a so-called Lucy-tag. MRPQILLLLALLTLGLA (SEQ ID NO: 76) is a human Lucy tag while MSHQILLLLALLTLGLA (SEQ ID NO: 77) is a mouse Lucy tag. Also encompassed are the sequences of SEQ ID NO: 76 and 77 wherein 1, 2, 3, 4, or up to 5 amino acids are substituted, deleted, added, or inserted. Substitutions, and in particular conservative substitutions, are preferred.

[0323] In some embodiments, an olfactory receptor as described herein further comprises an N-terminal tag peptide. Typically, the N-terminal tag peptide is a non-cleavable peptide.

[0324] N-terminal tag peptides may be epitope tags used to purify or capture the proteins. An example of such an epitope tag is a FLAG tag, further described below.

[0325] N-terminal tag peptides may also be peptides that facilitate expression. Examples of such tag peptides facilitating expression are a rhodopsin (rho) tag, an SST₃ tag and an M3-Tag, further described below.

[0326] In some embodiments, the N-terminal tag peptide is selected from the group consisting of a FLAG tag, a rhodopsin (rho) tag, an IL-6 tag, an SST₃ tag (45-N-terminal amino acids of the Somatostatin 3 receptor; an example of which is SEQ ID NO: 223), an M3-Tag (61-N-terminal amino acids of the muscarinic acetylcholine receptor M3; an example of which is SEQ ID NO: 222), a c-myc tag, and a HA tag, preferably from the group consisting of a FLAG tag, a rhodopsin (rho) tag, an SST₃ tag, and an M₃ tag, even more preferably from the group consisting of a FLAG tag and a rhodopsin (rho) tag, most preferably a rhodopsin (rho) tag. Accordingly, in some embodiments, an olfactory receptor protein as described herein further comprises an N-terminal tag peptide, preferably wherein the N-terminal tag peptide is selected from the group consisting of a FLAG tag, a rhodopsin (rho) tag, an IL-6 tag, an SST₃ tag, an M₃-Tag, a c-myc tag, and a HA tag, more preferably from the group consisting of a FLAG tag, a rhodopsin (rho) tag, an SST₃ tag, and an M₃ tag, even more preferably from the group consisting of a FLAG tag and a rhodopsin (rho) tag, most preferably is a rhodopsin (rho) tag.

[0327] In preferred embodiments, the N-terminal tag peptide comprises at least a tag peptide selected from the group consisting of a rhodopsin (rho) tag, an SST₃ tag, and an M₃ tag, preferably a rho tag. Optionally, a FLAG peptide may be further present.

[0328] Combinations of the above-described tag peptides may also be used. Typically, such combination will comprise at least one of a rho tag, an SST₃ tag, and an M3-Tag, preferably at least a rho tag. For example, in some embodiments, the N-terminal tag peptide is a combination of a Rho tag and a FLAG tag. In other words, in some embodiments, an olfactory receptor protein as described herein further comprises an N-terminal tag peptide, wherein the N-terminal tag peptide comprises a Rho tag and a FLAG tag. Preferably, in that situation, the FLAG tag is positioned N-terminally from the Rho tag, for example as shown in SEQ ID NO: 81.

[0329] FLAG-tags and rho-tags are described in Shepard et al. (2013) PloS One 8(7): e68758, in Zhuang and Matsunami (2007) J Biol Chem 282(20): 15284-15293, and in WO2014/037800, each of which is incorporated herein by reference. IL-6 tags are described in Noe et al. A bi-functional IL-6-HaloTag® as a tool to measure the cell-surface expression of recombinant odorant receptors and to facilitate their activity quantification. J Biol Methods. 2017, 4(4):e82, incorporated herein by reference. SST₃ tags and M₃ tags are described in Tan et al. (2022) Scientific reports 12:17658, incorporated herein by reference.

[0330] In some embodiments, a FLAG tag as described herein has the sequence of SEQ ID NO: 78. In some embodiments, a rho tag as described herein has the sequence of SEQ ID NO: 79. In some embodiments, an IL-6 tag as described herein is an IL-6-HaloTag® as described in Noe et al. (supra). A bi-functional IL-6-HaloTag® as a tool to measure the cell-surface expression of recombinant odorant receptors and to facilitate their activity quantification. J Biol Methods. 2017, 4(4):e82, incorporated herein by reference. In some embodiments, an SST₃ tag as described herein has the sequence of SEQ ID NO: 223. In some embodiments, an M₃ tag as described herein has the sequence of SEQ ID NO: 222. Also encompassed are the sequences of SEQ ID NO: 78, 79, 222, and 223, wherein 1, 2, 3, 4, or up to 5 amino acids are substituted, deleted, added, or inserted. Substitutions, and in particular conservative substitutions, are preferred.

[0331] N-terminal signal peptides as described herein and N-terminal tag peptides as described herein can, advantageously, be used in combination with each other. Typically, the N-terminal signal peptide will be positioned upstream (N-terminally) from the N-terminal tag. For example, an olfactory receptor as described herein may further comprise an N-terminal signal peptide and one or more N-terminal tag peptides. In some embodiments, an olfactory receptor as described herein may further comprise:
[0332] a human or mouse Lucy signal peptide (such as, SEQ ID NO: 76 or 77);
[0333] a FLAG tag (such as, SEQ ID NO: 78) or an IL-6 tag, preferably a FLAG tag (such as, SEQ ID NO: 78); and
[0334] a rho tag (such as, SEQ ID NO: 79), an SST₃ tag, or an M3-Tag, preferably a rho tag (such as, SEQ ID NO: 79).

[0335] SEQ ID NO: 80 is an example of a nucleotide sequence encoding a combination of a mouse Lucy signal peptide, a FLAG tag peptide and a rho tag peptide (SEQ ID NO: 81).

[0336] In some embodiments, an olfactory receptor as described herein is modified to comprise one or more additional N-terminal glycosylation sites. Such glycosylation sites are for example present in the M3 and SST₃ tags (Tan et al., Scientific Reports (2022) 12:17658) and in the N-terminal rho-tag (Kaushal et al., 1998, Proc Natl Acad Sci USA 91(9):4024-4028), described elsewhere herein.

[0337] In some embodiments, an olfactory receptor protein as described herein is such that the sequence motif is selected from the group consisting of SEQ ID NOs: 1, 5-75, 86-130, 133-147, 149-151, 154, 156-158, 166, 167, 198, 219-221, 254-312, 319-326, 328-331, 740-741, 820-890. Also encompassed in this context are the sequences of SEQ ID NOs: 1, 5-75, 86-130, 133-147, 149-151, 154, 156-158, 166, 167, 198, 219-221, 254-312, 319-326, 328-331, 740-741, and 820-890, wherein 1, 2, 3, 4, 5, 6, 7, 8, or up to 9 amino acids are substituted, deleted, added, or inserted. Preferably the sequence including substitutions, deletions, additions and/or insertions still corresponds to the general sequence motif of SEQ ID NO: 1. Substitutions, and in particular conservative substitutions, are preferred. Examples of particularly suitable amino acid substitutions in this context include the substitution of K for R, and R for K.

[0338] In some embodiments, an olfactory receptor protein as described herein is such that the sequence motif is selected from the group consisting of SEQ ID NOs: 1, 10-75, 86-130, 133-147, 149-151, 154, 156-158, 198, 219-221, 254-310, 321-326, 328-331, 740-741, and 827-890. Also encompassed in this context are the sequences of SEQ ID NOs: 1, 10-75, 86-130, 133-147, 149-151, 154, 156-158, 198, 219-221, 254-310, 321-326, 328-331, 740-741, and 827-890 wherein 1, 2, 3, 4, 5, 6, 7, 8, or up to 9 amino acids are substituted, deleted, added, or inserted. Substitutions, and in particular conservative substitutions, are preferred. Examples of particularly suitable amino acid substitutions in this context include the substitution of K for R, and R for K.

[0339] It is understood that, in the context of any of the olfactory receptors described throughout this disclosure, the term “comprising” may be replaced with the term “consisting essentially of” or “consisting”. In other words, in some embodiments, the olfactory receptors described herein have a modified C-terminal domain that consists essentially of the amino acid sequence motifs disclosed herein, or that consists of the amino acid sequence motifs disclosed herein.

### Nucleic Acid Molecules

[0340] In another aspect, this disclosure relates to nucleic acid molecules comprising a nucleotide sequence encoding any of the olfactory receptor proteins as described herein. A nucleotide sequence encoding an olfactory receptor may also be denoted as a “gene” encoding an olfactory receptor or a “coding sequence” for an olfactory receptor. Nucleotide sequences encoding olfactory receptors are part of the common general knowledge and can be obtained from well-known general and specific sequence databases by the person skilled in the art, as described elsewhere herein.

[0341] The nucleic acid molecules of this disclosure do not encode wild type olfactory receptors, instead, they encode the olfactory receptors having a modified C-terminal domain as described in detail in the preceding section. The nucleic acid molecules of this disclosure are therefore non-naturally occuring. It follows that the nucleic acid molecules described herein can, similarly, be characterized as “modified” nucleic acid molecules, “engineered” nucleic acid molecules, “hybrid” nucleic acid molecules, “chimeric” nucleic acid molecules, “non-natural” nucleic acid molecules, or similar expressions and combinations thereof.

[0342] Examplary nucleic acid molecules of this disclosure are provided as SEQ ID NOs: 331-739 and SEQ ID NOs: 742-819. Accordingly, in some embodiments, an olfactory receptor described herein is encoded by a nucleic acid molecule comprising a nucleotide sequence comprising at least 60%, at least 61%, at least 62%, at least 63%, at least 64%, at least 65%, at least 66%, at least 67%, at least 68%, at least 69%, at least 70%, at least 71%, at least 72%, at least 73%, at least 74%, at least 75%, at least 76%, at least 77%, at least 78%, at least 79%, at least 80%, at least 81%, at least 82%, at least 83%, at least 84%, at least 85%, at least 86%, at least 87%, at least 88%, at least 89%, at least 90%, at least 91%, at least 92%, at least 93%, at least 94%, at least 95%, at least 96%, at least 97%, at least 98%, at least 99% or 100% sequence identity with a sequence selected from the group consisting of SEQ ID NOs: 331-739 and SEQ ID NOs: 742-819.

[0343] SEQ ID NOs 331-739 represent DNA encoding a modified receptor including an N-terminal mmLucy-FLAG-rho tag (SEQ ID NO: 81) and a modified C-terminus (SEQ ID NO: 221). SEQ ID NOs 742-819 represent DNA encoding a modified receptor including an N-terminal mmLucy-FLAG-rho tag (SEQ ID NO: 81) and a modified C-terminus (SEQ ID NO: 741). As explained in this disclosure, the presence of the N-terminal tag is optional, and different N-terminal tags could be used, as described elsewhere herein. Similarly, any modified C-terminal domain disclosed herein may be used instead of the modified C-terminus of SEQ ID NO: 221 or SEQ ID NO: 741. SEQ ID NOs 331-739 and SEQ ID NOs 742-819 also include a 5′ BamHI restriction site (GGATCC) and Kozak sequence (GCCACC), and a 3′ NotI restriction site (GCGGCCGC) for cloning and expression purposes. The presence of these sequences is entirely optional.

[0344] The nucleic acid molecules of this disclosure may comprise further sequence elements. Typically, further sequence elements may be sequence elements that are commonly used to aid in expressing a nucleotide sequence such as, promoters, nuclear localization signals, kozak sequences, polyA-tails, transcription terminators, and the like. When one or more of such further sequence elements are present, the nucleic acid molecules described herein may also be referred to as “nucleic acid constructs” or “gene constructs”. It is understood that the different sequence elements may be “operably linked” with each other to achieve functional nucleic acid molecules. A description of “operably linked” is provided elsewhere herein in the section entitled “general information”.

[0345] As used herein, a “nucleic acid construct” refers to a DNA molecule comprising a region (coding region or ORF), which is transcribed into an RNA molecule (e.g. an mRNA molecule) in a cell, operably linked to a suitable regulatory region such as, but not limited to, a promoter and/or enhancer sequence. A nucleic acid construct will generally comprise multiple operably linked fragments, such as, a promoter, an enhancer, a 5′ leader sequence, a coding region, and/or a 3′ untranslated region (3′-end) e.g. comprising a polyadenylation and/or transcription termination site. A nucleic acid construct may be recombinant, i.e. not normally found in nature, such as, a nucleic acid construct wherein the promoter is not associated in nature with part or all of the coding region. Molecular toolbox techniques for preparation of nucleic acid constructs are well-known in the art and are discussed in standard handbooks such as Ausubel et al., Current Protocols in Molecular Biology, 3^{rd} edition (2003), John Wiley & Sons Inc and Sambrook and Green, Molecular Cloning: A Laboratory Manual, 4th Edition (2012), Cold Spring Harbor Laboratory Press; both of which are incorporated herein by reference in their entireties. Non-limiting examples of such techniques, some of which are demonstrated in the experimental section herein, are fusion PCR, restriction digestion, Golden-gate cloning, and the like.

[0346] In some embodiments, a nucleic acid molecule as described herein further comprises a promoter sequence. Put differently, this disclosure encompasses nucleic acid molecules as described herein, wherein said nucleotide sequence is operably linked to a promoter sequence. In some embodiments, a promoter sequence as described herein is a constitutive promoter sequence.

[0347] As used herein, the term “promoter” or “transcription regulatory sequence” refers to a nucleic acid sequence that functions to control the transcription of one or more coding sequences (i.e. expression), is located upstream with respect to the direction of transcription of the transcription initiation site of the coding sequence, and is structurally identified by the presence of a binding site for DNA-dependent RNA polymerase, transcription initiation sites and any other DNA sequences, including, but not limited to transcription factor binding sites, repressor and activator protein binding sites, and any other sequences of nucleotides known to one of skill in the art to act directly or indirectly to regulate the amount of transcription from the promoter.

[0348] In some embodiments, a promoter sequence as described herein, which is a constitutive promoter sequence as described herein, is a CMV promoter. In some embodiments, a CMV promoter may have the nucleotide sequence of SEQ ID NO: 82, or a sequence having at least 60%, 61%, 62%, 63%, 64%, 65%, 66%, 67%, 68%, 69%, 70%, 71%, 72%, 73%, 74%, 75%, 76%, 77%, 78%, 79%, 80%, 81%, 82%, 83%, 84%, 85%, 86%, 87%, 88%, 89%, 90%, 91%, 92%, 93%, 94%, 95%, 96%, 97%, 98%, 99% or 100% identity with SEQ ID NO: 82.

[0349] In some embodiments, a nucleic acid molecule as described herein further comprises an enhancer sequence. As used herein, the term “enhancer” refers to a nucleic acid sequence that can stimulate the transcription of a sequence it is operably linked to. An operably linked enhancer does not necessarily need to be contiguous with a coding sequence whose transcription it controls. An enhancer may be used as single sequence or may be comprised in a fusion nucleotide sequence with other enhancers and/or a promoter as described herein.

[0350] In some embodiments, a nucleic acid molecule as described herein further comprises a terminator sequence. Put differently, this disclosure encompasses nucleic acid molecules as described herein, wherein said nucleotide sequence is operably linked to a terminator sequence. A “terminator sequence” may alternatively be denoted herein as a “transcription terminator”, a “transcription terminator sequence” or simply a “terminator”. In some embodiments, a terminator sequence is a bovine growth hormone (bgh) terminator sequence. In some embodiments, a bgh terminator sequence may have the nucleotide sequence of SEQ ID NO: 83, or a sequence having at least 60%, 61%, 62%, 63%, 64%, 65%, 66%, 67%, 68%, 69%, 70%, 71%, 72%, 73%, 74%, 75%, 76%, 77%, 78%, 79%, 80%, 81%, 82%, 83%, 84%, 85%, 86%, 87%, 88%, 89%, 90%, 91%, 92%, 93%, 94%, 95%, 96%, 97%, 98%, 99% or 100% identity with SEQ ID NO: 83.

[0351] In some embodiments, a nucleic acid molecule as described herein further comprises a nucleotide sequence encoding an N-terminal signal peptide. Suitable N-terminal signal peptides are discussed earlier herein. In some embodiments, the N-terminal signal peptide is a leucine-rich signal peptide, preferably a human Lucy tag or a mouse Lucy tag, more preferably is a human Lucy tag or a mouse Lucy tag represented by the amino acid sequence MRPQILLLLALLTLGLA (SEQ ID NO: 76) or MSHQILLLLALLTLGLA (SEQ ID NO: 77). Also encompassed are the sequences of SEQ ID NO: 76 and 77 wherein 1, 2, 3, 4, or up to 5 amino acids are substituted, deleted, added, or inserted. Substitutions, and in particular conservative substitutions, are preferred.

[0352] In some embodiments, a nucleic acid molecule as described herein further comprises a nucleotide sequence encoding an N-terminal tag peptide. Suitable N-terminal tag peptides are discussed earlier herein.

[0353] In some embodiments, the N-terminal tag peptide is selected from the group consisting of a FLAG tag, a rhodopsin (rho) tag, an IL-6 tag, an SST₃ tag (45-N-terminal amino acids of the Somatostatin 3 receptor; an example of which is SEQ ID NO: 223), an M3-Tag (61-N-terminal amino acids of the muscarinic acetylcholine receptor M3; an example of which is SEQ ID NO: 222), a c-myc tag, and a HA tag, preferably from the group consisting of a FLAG tag, a rhodopsin (rho) tag, an SST₃ tag, and an M₃ tag, even more preferably from the group consisting of a FLAG tag and a rhodopsin (rho) tag, most preferably is a rhodopsin (rho) tag.

[0354] Accordingly, in some embodiments, a nucleic acid molecule as described herein further comprises a nucleotide sequence encoding an N-terminal tag peptide, preferably wherein the N-terminal tag peptide is selected from the group consisting of a FLAG tag, a rhodopsin (rho) tag, an IL-6 tag, an SST₃ tag, an M3-Tag, a c-myc tag, and a HA tag, more preferably from the group consisting of a FLAG tag, a rhodopsin (rho) tag, an SST₃ tag, and an M₃ tag, even more preferably from the group consisting of a FLAG tag and a rhodopsin (rho) tag, most preferably is a rhodopsin (rho) tag.

[0355] In preferred embodiments, the N-terminal tag peptide comprises at least a tag peptide selected from the group consisting of a rhodopsin (rho) tag, an SST₃ tag, and an M₃ tag, preferably a rho tag. Optionally, a FLAG peptide may be further present.

[0356] Combinations of the above-described tag peptides may also be used. Typically, such combination will comprise at least one of a rho tag, an SST₃ tag, and an M3-Tag, preferably at least a rho tag. For example, in some embodiments, the N-terminal tag peptide is a combination of a rho tag and a FLAG tag. In other words, in some embodiments, nucleic acid molecule as described herein further comprises a nucleotide sequence encoding an N-terminal tag peptide, wherein the N-terminal tag peptide comprises a rho tag and a FLAG tag. Preferably, in that situation, the FLAG tag is positioned N-terminally from the rho tag, for example as shown in SEQ ID NO: 81.

[0357] In some embodiments, an encoded FLAG tag by a nucleic acid molecule as described herein has the sequence of SEQ ID NO: 78. In some embodiments, an encoded rho tag by a nucleic acid molecule as described herein has the sequence of SEQ ID NO: 79. In some embodiments, an encoded IL-6 tag by a nucleic acid molecule as described herein is an IL-6-HaloTag® as described in Noe et al. In some embodiments, an encoded SST₃ tag by a nucleic acid molecule as described herein has the sequence of SEQ ID NO: 223. In some embodiments, an encoded M₃ tag by a nucleic acid molecule as described herein has the sequence of SEQ ID NO: 222. Also encompassed are the sequences of SEQ ID NO: 78, 79, 222, and 223 wherein 1, 2, 3, 4, or up to 5 amino acids are substituted, deleted, added, or inserted. Substitutions, and in particular conservative substitutions, are preferred.

[0358] Nucleotide sequences encoding N-terminal signal peptides as described herein and N-terminal tag peptides as described herein can, advantageously, be used in combination with each other. Typically, the nucleotide sequence encoding an N-terminal signal peptide will be positioned upstream (N-terminally) from the nucleotide sequence encoding the N-terminal tag. For example, a nucleic acid molecule as described herein may further comprise a nucleotide sequence encoding an N-terminal signal peptide and one or more N-terminal tag peptides. In some embodiments, a nucleic acid molecule as described herein may further comprise:
[0359] a nucleotide sequence encoding a human or mouse Lucy signal peptide (such as, SEQ ID NO: 76 or 77);
[0360] a FLAG tag (such as, SEQ ID NO: 78) or an IL-6 tag, preferably a FLAG tag (such as, SEQ ID NO: 78); and
[0361] a rho tag (such as, SEQ ID NO: 79), an SST₃ tag, or an M3-Tag, preferably a rho tag (such as, SEQ ID NO: 79).

[0362] SEQ ID NO: 80 is an example of a nucleotide sequence encoding a combination of a mouse Lucy signal peptide, a FLAG tag peptide and a rho tag peptide (SEQ ID NO: 81).

[0363] In some embodiments, a nucleic acid molecule as described herein is modified to comprise a nucleotide sequence encoding one or more additional N-terminal glycosylation sites.

[0364] In some embodiments, a nucleic acid molecule as described herein further comprises a nucleotide sequence encoding one or more olfactory receptor accessory proteins. Olfactory receptor “accessory proteins” or “chaperones” are proteins or peptides that may assist in the expression, trafficking, and/or signalling of an olfactory receptor to the surface of a cell expressing said olfactory receptor.

[0365] Non-limiting examples of accessory proteins encompassed by this disclosure include RTP1, RTP1 S, RTP2, REEP, β-adrenergic receptor, heat shock protein 70, Ric8b, Gα_{olf}, Giα, or functional variants thereof, and the like, and are further described in WO2006/002161 and WO2014/037800, incorporated herein by reference in their entireties. Preferred accessory proteins are RTP1 S and/or RTP2, preferably human RTP1 S and/or human RTP2.

[0366] Accessory proteins described herein also encompass functional variants of their wildtype counterparts, i.e., accessory molecules that have been modified as compared to the corresponding naturally-occurring or wildtype sequence. In that context, RTP1 S as used herein includes the RTP1 S V2271 variant, and RTP2 as used herein includes the RTP2 L220R variant. Preferred accessory proteins are the human RTP1 S V2271 variant (SEQ ID NO: 84) and the human RTP2 L220R variant (SEQ ID NO: 85).

[0367] Thus, in some embodiments, the one or more olfactory receptor “accessory proteins” as described herein are selected from the group consisting of RTP1, RTP1 S, RTP2, REEP, β-adrenergic receptor, heat shock protein 70, Ric8b, Gα_{olf}, Giα, and functional variants thereof, preferably selected from the group consisting of RTP1 S, RTP2 and functional variants thereof. In some embodiments, the one or more olfactory receptor “accessory proteins” as described herein are the RTP1S V2271 variant and the RTP2 L220R variant. In some embodiments, a nucleotide sequence encoding one or more olfactory receptor accessory proteins comprises a nucleotide sequence encoding a polypeptide as represented by SEQ ID NO: 84 and/or 85, or a nucleotide sequence encoding a polypeptide having at least 60%, 61%, 62%, 63%, 64%, 65%, 66%, 67%, 68%, 69%, 70%, 71%, 72%, 73%, 74%, 75%, 76%, 77%, 78%, 79%, 80%, 81%, 82%, 83%, 84%, 85%, 86%, 87%, 88%, 89%, 90%, 91%, 92%, 93%, 94%, 95%, 96%, 97%, 98%, 99% or 100% identity or similarity with SEQ ID NO: 84 and/or 85.

[0368] Nucleotide sequences described herein may be codon optimized for expression in a host cell, preferably in a eukaryotic cell, more preferably in a human cell. Suitable host cells are also described elsewhere herein, see e.g. the section “cells”. “Codon optimization”, as used herein, refers to the processes employed to modify an existing coding sequence, or to design a coding sequence, for example, to improve translation in an expression host cell or organism of a transcript RNA molecule transcribed from the coding sequence, or to improve transcription of a coding sequence. Codon optimization includes, but is not limited to, processes including selecting codons for the coding sequence to suit the codon preference of the expression host cell or organism. Codon optimization also eliminates elements that potentially impact negatively RNA stability and/or translation (e. g. termination sequences, TATA boxes, splice sites, ribosomal entry sites, repetitive and/or GC rich sequences and RNA secondary structures or instability motifs). In some embodiments, codon-optimized sequences show at least 3%, 5%, 10%, 15%, 20%, 25%, 30%, 40%, 50%, 60%, 70%, 80%, 90%, 100% or more increase in gene expression, transcription, RNA stability and/or translation compared to the original, non-codon-optimized sequence.

### Expression Vectors

[0369] Nucleic acid molecules as described herein can be placed in expression vectors. Thus, in another aspect there is provided an expression vector comprising any of the nucleic acid molecules as described herein.

[0370] An “expression vector”, alternatively referred to herein as “vector” or “delivery vector”, refers to a molecular biology tool used to obtain expression of a coding region (such as a gene) in a host cell, for example by introducing a nucleotide sequence that is capable of effecting expression of a gene or a coding sequence in a host cell compatible with said sequence. An expression vector may be able to stabilize and remain episomal in a host cell. Alternatively, a vector may be able to integrate into a host cell's genome, for example through homologous recombination, non-homologous end-joining, or otherwise. A description of suitable “host cells” in the context of this diclosure is provided elsewhere herein.

[0371] Suitable expression vectors may be selected from any genetic element known in the art which can facilitate transfer of nucleic acids between cells, such as, but not limited to, plasmids, phages, transposons, cosmids, chromosomes, artificial chromosomes, viruses (such as, but not limited to, retroviruses, lentiviruses, and the like), virions, and the like. An expression vector may also be a chemical vector, such as, a lipid complex or naked DNA. “Naked DNA” or “naked nucleic acid” refers to a nucleic acid molecule that is not contained in encapsulating means that facilitates delivery of a nucleic acid into the cytoplasm of a target host cell. Naked DNA may be circular or linear (linearized DNA sequence). Optionally, a naked nucleic acid can be associated with standard means used in the art for facilitating its delivery of the nucleic acid to the target host cell, for example to facilitate the transport of the nucleic acid through the cell membrane.

[0372] A preferred expression vector is a plasmid. Suitable plasmids are known in the art and described in standard handbooks such as Ausubel et al. and Sambrook and Green (supra). Suitable plasmids may also be selected from commercially available vectors, such as, the pcDNA3.1(+) series (Invitrogen, MA, USA) or the pGL4.29 series of vectors (Promega, WI, USA).

### Cells

[0373] The nucleic acid molecules and expression vectors described herein are particularly useful for introduction into a host cell. Accordingly, in another aspect, there is provided a recombinant host cell comprising a nucleic acid molecule or an expression vector as described earlier herein. Preferably, the recombinant host cells described herein express or are capable of expressing an olfactory receptor protein as described herein.

[0374] In some embodiments, host cells of this disclosure comprise multiple, i.e. two or more, nucleic acid molecules and/or expression vectors as described herein. Accordingly, in that case, the recombinant host cells express or are capable of expressing multiple, i.e. two or more, olfactory receptor proteins as described herein. In the context of such host cells, the two or more olfactory receptors are preferably activated by odorants having similar odors. Odorants having a similar odor will typically be described by the same odor descriptors. An “odor descriptor” is a common term used by trained perfumers and evaluators to describe a particular odor sensation common to a group of ligands or mixture of ligands. Odor descriptors are for example ‘green’ for odors reminiscent of fresh crushed leaves or ‘floral’ for scents of flowers. They can then also be more specific such as ‘floral-rosy’ for notes reminding of rose odors, or ‘white-floral’ for odors reminding of Ylang-ylang or jasmine and so on.

[0375] In some embodiments, combinations of two or more olfactory receptor proteins in this context may be selected from the group consisting of:
[0376] OR7A17 and OR7C1. These ORs are activated by molecules with the odor descriptor ‘woody-ambery’ and could be co-expressed in a cell to detect woody-ambery notes.
[0377] OR5A2, OR5AN1, and OR1N2. These ORs are activated by molecules with the odor descriptor ‘musky’ and two or more olfactory receptor proteins of this group could be co-expressed in a cell to detect musky notes.
[0378] OR2L2, OR2L3, OR2L5, OR2AK2, and OR11G2. These ORs are activated by molecules with the odor descriptor ‘fruity-ester’ and two or more olfactory receptor proteins of this group could be co-expressed in a cell to detect fruity-ester notes.
[0379] OR10A3, OR10A6, and OR10J1. These ORs are activated by molecules with the odor descriptor ‘fruity-lactonic’ and two or more olfactory receptor proteins of this group could be co-expressed in a cell to detect fruity-lactonic notes.
[0380] OR10H1, OR10H2, OR10H5, and OR10K1. These ORs are activated by molecules with the odor descriptor ‘marine’ and two or more olfactory receptor proteins of this group could be co-expressed in a cell to detect marine notes.
[0381] OR10G7 and OR10D3. These ORs are activated by molecules with the odor descriptor ‘spicy’ and could be co-expressed in a cell to detect spicy notes.

[0382] A “host cell”, alternatively referred to herein as a “recombinant host cell”, “engineered cell”, or simply “cell” refers to a cell that has been engineered by the introduction of a nucleic acid molecule and/or an expression vector as defined herein. A host cell may refer to a cell in isolation or in culture. Host cells may be “transduced cells”, wherein the cells have been infected with e.g. a modified virus. As a non-limiting example a lentivirus may be used, but other suitable viruses such as retroviruses or others may be contemplated as well. Introduction of a nucleic acid construct may also be performed by non-viral methods, e.g. by transfection. “Transfection” refers to non-viral methods of DNA (or RNA) transfer to cells such that the transferred nucleic acid sequence is expressed. Transfection methods and protocols are well-known in the art, with non-limiting examples being calcium phosphate transfection, PEG transfection, and liposomal or lipoplex transfection, and discussed in standard handbooks such as Ausubel et al. and Sambrook and Green (supra). A further example of a transfection method is provided in the exemplary section herein. A transfection may be transient or stable, the latter referring to cases wherein cells have the nucleic acid construct integrated in their genome. Host cells comprising a nucleic acid construct as described herein may thus also be “stably transfected cells” or “transiently transfected cells”.

[0383] A host cell may be further genetically modified, for example by the introduction of one or more genetic modifications including, but not limited to, nucleotide mutations, substitutions, insertions, and/or deletions in its genome, and/or introduction of additional nucleic acid constructs. Said modifications may be comprised in a nucleotide sequence encoding an olfactory receptor, an accessory molecule, and/or another genomic region and may result in functional expression or improved functional expression of said olfactory receptor and/or said accessory molecule. A definition of functional expression is provided elsewhere herein.

[0384] Modification of a nucleic acid sequence may be performed using any recombinant DNA technique as known in the art, such as for example described in standard handbooks such as Ausubel et al. and Sambrook and Green (supra). Also see, Kunkel (1985) Proc. Natl. Acad. Sci. 82:488 (describing site directed mutagenesis) and Roberts et al. (1987) Nature 328:731 734 or Wells, J. A., et al. (1985) Gene 34: 315 (describing cassette mutagenesis).

[0385] A host cell may comprise epigenetic modifications in a nucleic acid molecule encoding an olfactory receptor, an accessory protein, and/or another genomic region which may result in functional expression or improved functional expression of said olfactory receptor and/or said accessory protein. As used herein, the term “epigenetic modification” has its customary meaning as ordinarily understood by the skilled person in view of this disclosure. It refers to chemical modifications of DNA or histone proteins that do not alter a nucleotide sequence itself. Non-limiting examples of epigenetic modifications include nucleic acid methylation, acetylation, phosphorylation, serotonylation, citrullination, ubiquitination, sumoylation, and ribosylation.

[0386] Advantageously, in some embodiments, a recombinant host cell as described herein further expresses one or more olfactory receptor accessory proteins as described herein. To achieve this, additional nucleic acid molecules or expression vectors encoding one or more olfactory receptor accessory proteins may be comprised in the recombinant host cells. These additional nucleic acid molecules or expression vectors may be stably integrated into the chromosome or they may be introduced for transient expression, e.g. by transfection. Suitable olfactory receptor accessory proteins have already been described elsewhere herein. Thus, in some embodiments, the one or more olfactory receptor “accessory proteins” as described herein are selected from the group consisting of RTP1, RTP1 S, RTP2, REEP, β-adrenergic receptor, heat shock protein 70, Ric8b, Gα_{olf}, Giα, and functional variants thereof, preferably selected from the group consisting of RTP1 S, RTP2 and functional variants thereof. In some embodiments, the one or more olfactory receptor “accessory proteins” as described herein are the RTP1S V2271 variant and the RTP2 L220R variant. In some embodiments, a nucleotide sequence encoding one or more olfactory receptor accessory proteins comprises a nucleotide sequence encoding a polypeptide as represented by SEQ ID NO: 84 and/or 85, or a nucleotide sequence encoding a polypeptide having at least 60%, 61%, 62%, 63%, 64%, 65%, 66%, 67%, 68%, 69%, 70%, 71%, 72%, 73%, 74%, 75%, 76%, 77%, 78%, 79%, 80%, 81%, 82%, 83%, 84%, 85%, 86%, 87%, 88%, 89%, 90%, 91%, 92%, 93%, 94%, 95%, 96%, 97%, 98%, 99% or 100% identity or similarity with SEQ ID NO: 84 and/or 85.

[0387] In some embodiments, a recombinant host cell as described herein further expresses one or more reporter genes, such as a luciferase gene. Reporter genes are described in more detail elsewhere herein.

[0388] Recombinant host cells as described herein may be prokaryotic or eukaryotic cells, preferably they are eukaryotic cells. Suitable prokaryotic cells may be selected from bacteria and archaea. Suitable eukaryotic cells may be selected from insect, plant, yeast, fungal, algal, mammalian, and human cells, of which human cells are preferred.

[0389] Suitable host cells include, but are not limited to, HEK293, HEK293T, HeLa, CHO, OP6, HeLa-S3, HEKn, HEKa, PC-3, CaluI, Hep G2, HeLa B, HeLa T4, COS, COS-1, COS-6, C0S-M6A, BS-C-1 monkey kidney epithelial cells, BALB/3T3 mouse embryo fibroblasts, 3T3 Swiss, 3T3-L1, 132-d5 human fetal fibroblasts, 10.1 mouse fibroblasts, 293-T, 3T3, BHK, BHK-21, BR 293, BxPC3, C3H-10T1/2, C6/36, Cal-27, CHO-7, CHO-IR, CHO-K1, CHO-K2, CHO-T, CHO Dhfr −/− COS-7, HL-60, LNCap, MCF-7, MCF-IOA, MDCK II, SkBr3, Vero cells, primary olfactory cells, immortalized olfactory cells, immortalized taste cells, and transgenic varieties thereof, of which HEK293 and HEK293T are preferred. Accordingly, in some embodiments, a recombinant host cell as described herein is a HEK293 or HEK293T cell. Among HEK293 and HEK293T, HEK293T is more preferred. Cell lines are available from a variety of publicly available culture collections, e.g. the American Type Culture Collection (VA, USA).

### Libraries

[0390] In another aspect, this disclosure relates to a library comprising a diverse repertoire of olfactory receptor proteins as described herein, nucleic acid molecules as described herein, expression vectors as described herein, or recombinant host cells as described herein.

[0391] In some embodiments of a library as described herein, the diverse repertoire of olfactory receptor proteins, of olfactory receptor proteins encoded by the nucleic acid molecules or expression vectors, or of olfactory receptor proteins expressed by the recombinant host cells, shares the same modified C-terminal domain. In a specific but non-limiting example, they share the modified C-terminal domain represented by SEQ ID NO: 221 (particularly in the context of class II olfactory receptors) or SEQ ID NO: 741 (particularly in the context of class I olfactory receptors).

[0392] Such a library of olfactory receptors with an identical C-terminal domain advantageously provides for a more homogenous functional activity of all receptors. While a library of the majority of receptors with their wild-type C-terminus has vastly different functional expression levels, functional expression between receptors is better comparable in a library with identical C-terminal sequences. Thus testing a ligand vs. such a normalized library with identical C-terminus allows to find the most sensitive receptor(s) activated by a given ligand, which is crucial to later screen novel ligands within a given odor description. If on the other hand the target receptor would have been identified from a library with vastly divergent functional expression, the selection of the receptor may be skewed by the arbitrary functional expression in the in vitro system rather than by the true ligand affinity.

[0393] A library as described herein is not particularly limited with respect to the number of distinct olfactory receptor proteins, nucleic acid molecules or expression vectors encoding distinct olfactory receptor proteins, or recombinant host cells expressing distinct olfactory receptor proteins. However, in some embodiments, a library as described herein comprises a diverse repertoire of at least 10, at least 25, at least 50, at least 75, at least 100, at least 150, at least 200, at least 250, at least 300, at least 350, or at least 400 distinct olfactory receptor proteins, nucleic acid molecules or expression vectors encoding distinct olfactory receptor proteins, or recombinant host cells expressing distinct olfactory receptor proteins.

[0394] In some embodiments, a library as described herein comprises a diverse repertoire of about 250 to about 800 distinct olfactory receptor proteins, nucleic acid molecules or expression vectors encoding distinct olfactory receptor proteins, or recombinant host cells expressing distinct olfactory receptor proteins. Such library size allows coverage of the majority of dog olfactory receptors.

[0395] In some embodiments, a library as described herein comprises a diverse repertoire of about 250 to about 670 distinct olfactory receptor proteins, nucleic acid molecules or expression vectors encoding distinct olfactory receptor proteins, or recombinant host cells expressing distinct olfactory receptor proteins. Such library size allows coverage of the majority of cat olfactory receptors.

[0396] In some embodiments, a library as described herein comprises a diverse repertoire of about 250 to about 500 or 250 to about 400 distinct olfactory receptor proteins, nucleic acid molecules or expression vectors encoding distinct olfactory receptor proteins, or recombinant host cells expressing distinct olfactory receptor proteins. Such library size allows coverage of the majority of human olfactory receptors.

[0397] In some embodiments, a library as described herein comprises a diverse repertoire of about 400 to about 800 distinct olfactory receptor proteins, nucleic acid molecules or expression vectors encoding distinct olfactory receptor proteins, or recombinant host cells expressing distinct olfactory receptor proteins. Such library size allows coverage of the majority of human olfactory receptors including major alternative alleles or haplotypes.

[0398] Libraries may contain both class I and class II ORs, or libraries may be focused on Class I ORs or on Class II ORs. Accordingly, in some embodiments, a library as described herein comprises distinct class II olfactory receptor proteins, preferably human class II olfactory receptor proteins, nucleic acid molecules or expression vectors encoding said olfactory receptor proteins, or recombinant host cells expressing said olfactory receptor proteins. A library of Class II ORs as described herein may comprises a diverse repertoire of at least 10, at least 25, at least 50, at least 75, at least 100, at least 150, at least 200, at least 250, at least 300, at least 350, or at least 400 distinct olfactory receptor proteins, nucleic acid molecules or expression vectors encoding distinct olfactory receptor proteins, or recombinant host cells expressing distinct olfactory receptor proteins. A preferred number in the context of libraries of human Class II ORs is 400 to 450. Preferably, such a library comprises at least one, preferably all of the class II olfactory receptors listed as “receptor” in Table 15. It is understood that in such a library, a class II olfactory receptor may differ from the specific SEQ ID NOs in Table 15 in its N-terminal tag or its modified C-terminal domain, for example a different modified C-terminal domain as described herein may be comprised by the receptor instead of the modified C-terminal domain comprised by the olfactory receptors encoded by the nucleic acid molecules listed in Table 15. SEQ ID NOs 331-739 also include a 5′ BamHI restriction site (GGATCC) and Kozak sequence (GCCACC), and a 3′ NotI restriction site (GCGGCCGC) for cloning and expression purposes. The presence of these sequences is entirely optional.

[0399] In some embodiments, a library as described herein comprises distinct class I olfactory receptor proteins, preferably human class I olfactory receptor proteins, nucleic acid molecules or expression vectors encoding said olfactory receptor proteins, or recombinant host cells expressing said olfactory receptor proteins. A library of Class I ORs as described herein may comprises a diverse repertoire of at least 10, at least 25, at least 50, or at least 75 distinct olfactory receptor proteins, nucleic acid molecules or expression vectors encoding distinct olfactory receptor proteins, or recombinant host cells expressing distinct olfactory receptor proteins. A preferred number in the context of libraries of human Class II ORs is 70 to 100. Preferably, such a library comprises at least one, preferably all of the class I olfactory receptors listed as “receptor” in Table 22. It is understood that in such a library, a class I olfactory receptor may differ from the specific SEQ ID NOs in Table 22 in its N-terminal tag or its modified C-terminal domain, for example a different modified C-terminal domain as described herein may be comprised by the receptor instead of the modified C-terminal domain comprised by the olfactory receptors encoded by the nucleic acid molecules listed in Table 22. SEQ ID NOs 742-819 also include a 5′ BamHI restriction site (GGATCC) and Kozak sequence (GCCACC), and a 3′ NotI restriction site (GCGGCCGC) for cloning and expression purposes. The presence of these sequences is entirely optional.

[0400] In some embodiments, a library as described herein comprises distinct class I and class II olfactory receptor proteins, preferably human class I and class II olfactory receptor proteins, nucleic acid molecules or expression vectors encoding said olfactory receptor proteins, or recombinant host cells expressing said olfactory receptor proteins. In this context, a library may preferably comprise a diverse repertoire of 470 to 550 distinct olfactory receptor proteins, nucleic acid molecules or expression vectors encoding distinct olfactory receptor proteins, or recombinant host cells expressing distinct olfactory receptor proteins.

### Methods and Uses

[0401] The olfactory receptors, nucleic acid molecules, recombinant host cells, and libraries described herein enable the functional expression of olfactory receptors otherwise not possible to express using conventional approaches or which lead to assays with limited sensitivity using conventional approaches and in the identification of novel cognate receptor-ligand pairs. Thus, they are particularly useful for application in methods and uses for expressing olfactory receptors and for identifying novel olfactory receptors and novel olfactory receptor ligands, enhancers and antagonists.

[0402] In an aspect, there is provided a use of an olfactory receptor protein as described herein, a nucleic acid molecule as described herein, an expression vector as described herein, a cell as described herein, or a library as described herein, for identifying an olfactory receptor ligand, enhancer or antagonist.

[0403] In an aspect, there is provided a use of a library as described herein, for identifying an olfactory receptor that is capable of binding a target ligand.

[0404] In an aspect, there is provided a method for identifying an olfactory receptor ligand, said method comprising:
[0405] a) providing an olfactory receptor protein as described herein or a cell expressing an olfactory receptor protein as described herein;
[0406] b) contacting said receptor or cell with a test compound or composition; and
[0407] c) detecting activation of the olfactory receptor.

[0408] In an aspect, there is provided a method for identifying an olfactory receptor enhancer or antagonist, said method comprising:
[0409] a) providing an olfactory receptor protein as described herein or a cell expressing an olfactory receptor protein as described herein;
[0410] b) contacting said receptor or cell with a cognate ligand and a test compound or composition; and
[0411] c) detecting increased or decreased activation of the olfactory receptor as compared to controls with ligand only.

[0412] An olfactory receptor “antagonist” as used herein is a compound that decreases the activation of a given olfactory receptor by an OR ligand. An olfactory receptor “enhancer” as used herein is a compound that increases the activation of a given olfactory receptor by an OR ligand.

[0413] In some embodiments of a method for identifying an olfactory receptor ligand, and of a method for identifying an olfactory receptor enhancer or antagonist, the olfactory receptor is selected from the group consisting of OR7C1, OR8K3 (preferably OR8K3(L122R)), OR10J5, OR7A17, OR10H5, OR5A1, OR5A2, OR1N2 (preferably OR1N2(W23R,V230G,T287M)), OR2M2, OR2V1, OR5P3, OR6P1, OR2L2 (or OR2L2(V259L)), OR10G7 (preferably OR10G7(T5S)), OR5AN1, OR5V1, OR2L3, OR2AG2 (preferably OR2AG2(Y28C)), OR7A5, OR7E24 (or OR7E24(P242S)), OR7A10, OR10H2, OR10H1, OR10D3, OR1D2, OR2A5, OR2A25 (OR2A25(S75N,A209P)), OR11 G2 (or OR11 G2(I65N,V82I)), OR14J1, OR5M3, OR8D1, OR10G3 (preferably OR10G3(S73G)), OR10G9, OR2L5, OR8H1, OR10K1, OR11A1, OR2AK2 (preferably OR2AK2(S84N)), OR10A3, OR10A6 (preferably OR10A6(A117V,V140G,L287P)), OR10J1 (preferably OR10J1(M51I,I92M)), OR2J2, and OR2AG2 (preferably OR2AG2(Y28C)). For these receptors, identifying olfactory receptor ligands and identifying olfactory receptor enhancers is of particular interest. In some embodiments of a method for identifying an olfactory receptor ligand, and of a method for identifying an olfactory receptor enhancer or antagonist, the olfactory receptor is OR5A2, OR5A1, OR7A17, OR7C1, OR8K3, OR1N2, OR10J5, OR5B12 or OR10H5.

[0414] In some embodiments of a method for identifying an olfactory receptor enhancer or antagonist, the method is such that it is for identifying an olfactory receptor antagonist, and the olfactory receptor is selected from the group consisting of OR52A5, OR52E8, OR56A1, OR56A3, OR56A4, OR52K1, OR51B2 (preferably OR51B2(C120R, L134F, C209S)), OR51B5, OR9Q2, OR7D4, OR2T4, OR2C1, OR2T11, OR2M2, OR2V1, OR5V1, and OR4S2, preferably selected from the group consisting of OR2M2, OR2V1, OR51B2 (preferably OR51B2(C120R,L134F,C209S)), and OR5V1, OR2M2 and OR2V1 are more preferred. Among these two, OR2M2 is more preferred.

[0415] In some embodiments of a method for identifying an olfactory receptor enhancer or antagonist, the method is such that it is for identifying an olfactory receptor antagonist, and the olfactory receptor is OR2M2 or OR2V1, preferably OR2M2. In this situation, optionally, step b) further comprises contacting said receptor or recombinant host cell with a copper salt. Accordingly, in some embodiments, this disclosure provides a method for identifying an olfactory receptor antagonist, said method comprising:
[0416] a) providing an OR2M2 or OR2V1 olfactory receptor protein as described herein or a cell expressing an OR2M2 or OR2V1 olfactory receptor protein as described herein;
[0417] b) contacting said receptor or cell with a cognate ligand, a test compound or composition, and a copper salt; and
[0418] c) detecting increased or decreased activation of the olfactory receptor as compared to controls with ligand only.

[0419] In some embodiments, the copper salt may be used in a concentration between 1 and 100 μM, preferably between 10 and 100 μm, for example 30 μM. Suitable copper salts include copper(II) salts such as CuCl₂, CuSO₄, Cu(OH)₂ and copper acetate.

[0420] In the context of such methods for identifying an OR2M2 or an OR2V1 antagonist, the cognate ligand is preferably selected from the group consisting of 3-methyl-3-sulfanyl-hexanol, 2-mercapto-2-methyl-pentanol, and 4-methoxy-2-methylpentane-2-thiol.

[0421] In some embodiments of a method for identifying an olfactory receptor enhancer or antagonist, the method is such that it is for identifying an olfactory receptor antagonist, and the olfactory receptor is OR51B2, preferably OR51B2(C120R,L134F,C209S). In the context of such methods for identifying an OR51B2 antagonist, the cognate ligand is preferably 3-methyl-2-hexenoic acid.

[0422] In some embodiments of a method for identifying an olfactory receptor enhancer or antagonist, the method is such that it is for identifying an olfactory receptor antagonist, and the olfactory receptor is OR5V1. In the context of such methods for identifying an OR5V1 antagonist, the cognate ligand is preferably 2,4,6-trichloroanisol.

[0423] As explained earlier herein, this disclosure encompasses libraries comprising a diverse repertoire of olfactory receptor proteins, of nucleic acid molecules or expression vectors expressing olfactory receptor proteins, and of recombinant host cells expressing olfactory receptor proteins, preferably wherein each of the olfactory receptor proteins shares the same modified C-terminal domain. Advantageously, such a library of olfactory receptors with an identical C-terminal domain provides for a homogenous and uniform functional expression of all receptors when detecting activation of olfactory receptors.

[0424] Accordingly, in an aspect there is provided a method for generating an objective representation of the olfactory properties of a test compound or composition, said method comprising:
[0425] a) providing a library as described herein;
[0426] b) optionally, obtaining a diverse repertoire of olfactory receptor proteins or cells expressing olfactory receptor proteins from said library;
[0427] c) contacting the diverse repertoire of olfactory receptor proteins or cells expressing olfactory receptor proteins with the test compound or composition; and
[0428] d) detecting activation of each of the olfactory receptor proteins.

[0429] Also encompassed is the use of a library as described herein, for generating an objective representation of the olfactory properties of a test compound or composition.

[0430] Such objective representation of olfactory properties can be referred to as an OR activation ‘fingerprint’. It is possible to represent the level of activation of each olfactory receptor as an n-dimensional vector, wherein n is the number of distinct olfactory receptors that is included in the library. More information about ways to measure and express the level of activation of olfactory receptors is provided elsewhere herein.

[0431] This type of objective representation of olfactory properties also allows to compare, in an objective manner, the olfactory properties between two or more test compounds or compositions.

[0432] Accordingly, in an aspect there is provided a method for assessing the difference or similarity between two or more test compounds or compositions, said method comprising:
[0433] a) generating an objective representation of the olfactory properties of the two or more test compounds or compositions, as described herein; and
[0434] b) comparing the objective representation of the olfactory properties between the two or more test compounds or compositions.

[0435] In some embodiments, there is provided a method for assessing the difference or similarity between two or more test compounds or compositions, said method comprising:
[0436] a) providing a library as described herein;
[0437] b) optionally, obtaining a diverse repertoire of olfactory receptor proteins or cells expressing olfactory receptor proteins from said library;
[0438] c) contacting the diverse repertoire of olfactory receptor proteins or cells expressing olfactory receptor proteins with each of the two or more test compounds or compositions;
[0439] d) detecting activation of each of the olfactory receptor proteins for each of the two or more test compounds or compositions; and
[0440] e) comparing the activated olfactory receptor proteins between each of the two or more test compounds or compositions.

[0441] Also encompassed is the use of a library as described herein, for assessing the difference or similarity between two or more test compounds or compositions.

[0442] In some embodiments, the two or more test compounds or compositions may involve a first test composition and a second test composition. In some embodiments, the second composition lacks one or more compounds present in the first composition but otherwise comprises the same compounds as the first composition; or the second composition comprises one or more alternative compounds for one or more compounds present in the first composition, but otherwise comprises the same compounds as the first composition.

[0443] In some embodiments, the last step of comparing the objective representation of the olfactory properties the activated olfactory receptor proteins between each of the two or more test compounds or compositions, includes the calculation of a distance measure. Suitable distance measures are known to the skilled person. As an example, the level of activation of each olfactory receptor may be represented as an n-dimensional vector, and the distance measure may be a measure of the distance between two vectors. In some embodiments, the distance between two vectors may be based on the so-called 1-norm or L1 norm. The L1 norm is a standard measure in mathematics and is calculated as the sum of the absolute values of the vector. The distance between two vectors can then be calculated based on the norm of their difference. Thus, the distance between a first test compound or composition and a second test compound or composition may be calculated according to the following formula:

$$Distance = {\sum }_{{OR}_{1}}^{{OR}_{n}} \vert level of activation for test compound or composition 1 - level of activation for test compound or composition 2 \vert$$

[0444] This distance is also known as the Euclidean distance. More information about ways to measure and express the level of activation of olfactory receptors is provided elsewhere herein.

[0445] In some embodiments, the test compound or composition involved in the methods of this disclosure is a mixture of odorants. Indeed, the increased sensitivity of the methods disclosed herein enables the detection of ligands, enhancers, and antagonists from complex samples against a matrix of strong odorants. In some embodiments, the test compound or composition is a perfume composition. In some embodiments, the test compound or composition is a composition, such as a perfume composition, comprising at least 5, at least 10, at least 15, at least 20, at least 25, at least 30, at least 35, at least 40, at least 45, or at least 50 odorants.

[0446] In some embodiments, the test compound or composition involved in the methods of this disclosure is an unpurified synthetic compound. Automated parallel synthesis of single compounds has dramatically increased the numbers of novel organic compounds available for biological assays. However, a disadvantage of automated parallel synthesis is that difficult and expensive subsequent purification steps are usually required before they can be employed in biological assays. This is especially true for sensory assays, where the olfactive assessment of a new perfume or flavour ingredient is difficult in presence of smelling impurities contributing off-odors or masking the scent of the desired molecule. Advantageously, the increased sensitivity of the methods disclosed herein enables the use of unpurified synthetic compounds. Accordingly, in some embodiments, the test compound or composition involved in the methods of this disclosure comprises an unpurified synthetic molecule. In this case, the synthetic molecule may have a purity level of less than 90%, less than 85%, less than 80%, less than 75% or less than 70% (the % purity level being the ratio of the desired product to that of the combined impurities, typically measured by liquid chromatography, gas chromatography or quantitative NMR).

[0447] In accordance with the above, in some embodiments, the test compound or composition involved in the methods of this disclosure is a mixture of odorants (as described above) or an unpurified synthetic compound (as described above).

[0448] In some embodiments, the test compound or composition involved in the methods of this disclosure is a racemic mixture of odorants. In some embodiments, the test compound or composition involved in the methods of this disclosure are isolated or synthetic isomers or enantiomers of such a racemic mixture.

[0449] As explained elsewhere, olfactory receptors have also been found to be associated with various disease. Accordingly, in some embodiments, the test compound or composition may comprise a candidate therapeutic agent, such as a candidate anti-cancer agent. In some embodiments, the test compound or composition may comprise a pharmacologically active agent.

[0450] Ligands, enhancers and antagonists as described herein are preferably biodegradable. Indeed, there is a growing interest in the field to move towards ingredients that are biodegradable. Accordingly, in some embodiments, the test compound or composition involved in the methods of this disclosure is a biodegradable compound or composition. As used herein, a compound or composition is considered to be biodegradable if it meets the pass criteria in accordance with OECD manometric respirometry methods, and in particular the OECD 301F method which methods are well known in the art. In this method the pass level for a compound to be considered as having “ready biodegradability” or being “readily biodegradable” is to reach 60% of theoretical oxygen demand and/or chemical oxygen demand. This pass value has to be reached in a 10-day window within the 28-day period of the test. The 10-day window begins when the degree of biodegradation has reached 10% of theoretical oxygen demand and/or chemical oxygen demand and must end before day 28 of the test. Given a positive result in a test of ready biodegradability, it may be assumed that a compound will undergo rapid and ultimate biodegradation in the environment (Introduction to the OECD 25 Guidelines for the Testing of Chemicals, Section 3, Part 1: Principles and Strategies Related to the Testing of Degradation of Organic Chemicals; Adopted: July 2003). An assessment of “inherently biodegradable” can also be made using the OECD Method 301F, although with a different pass criterion. More specifically, the pass criterion is 60% of theoretical oxygen demand and/or chemical oxygen demand. This pass value can be reached after the 28-day period of the test, which is usually extended to 60 days. No 10-day window applies.

[0451] In some embodiments, the test compound or composition involved in the methods of this disclosure is a readily biodegradable compound or composition. In some embodiments, the test compound or composition involved in the methods of this disclosure is an inherently biodegradable compound or composition.

[0452] In an aspect, there is provided a method for identifying an olfactory receptor that is capable of binding a target ligand, said method comprising:
[0453] a) providing a library as described herein;
[0454] b) optionally, obtaining a diverse repertoire of olfactory receptor proteins or cells expressing olfactory receptor proteins from said library;
[0455] c) contacting the diverse repertoire of olfactory receptor proteins or cells expressing olfactory receptor proteins with the target ligand; and
[0456] d) identifying an olfactory receptor that is activated by the target ligand.

[0457] All of the methods described herein involve detection of activation of an olfactory receptor. It is understood that detecting activation of an olfactory receptor may mean to measure the level of activation of an olfactory receptor. Hence, throughout this disclosure, “detecting activation” may be replaced with “measuring the level of activation” or similar expressions. Means and methods for detecting activation of olfactory receptors are commonly available in the art.

[0458] For example, and as described in detail in the experimental section herein, detecting activation of olfactory receptors may involve the co-transfection or use of a luciferase gene operably linked to a cAMP-responsive promoter/element (Saito et al. (2004) Cell 119(5): 679-691, incorporated herein by reference in its entirety), which is used as a reporter gene. The activation of the olfactory receptor and subsequent increase in intracellular cAMP results in expression of luciferase. Cleavage of luciferin by luciferase results in the emission of light which can then be detected and quantified.

[0459] To measure and report the (level of) activation of olfactory receptors, for example, the fold-induction of luciferase can be calculated. Typically, the fold-induction is taken relative to a solvent-only control. Usually, a background control without cells but with all other reagents is also taken along, and the value of this control will be subtracted from all measured values to account for background luminescence. For the solvent-only control, cells expressing the OR and the luciferase gene are treated with solvent only (excluding the test compound or composition). All the values of experiments with test compounds and compositions are then divided by the average of these solvent-only control measurements to calculate fold-luciferase induction. Solvent controls and test compounds and compositions that do not cause OR activation will thus obtain a value of 1, indicating no luciferase induction. Values which are significantly above 1 indicate activation of the luciferase gene and thus enhanced cAMP production due to OR activation.

[0460] Once a strong ligand is known for a given OR and the concentration of that ligand for maximal OR activation, this ligand (tested at its maximal inducing concentration) can be introduced as a positive control into the experiment, and fold-luciferase can be reported as % activation of the positive control according to the following formula:

$$\% activation = \frac{Fold luciferase activation test compound - 1}{Fold luciferase activation positive control - 1} \times 100$$

[0461] Based on this calculation, potency of ligands can then be compared by applying sigmoidal curve fit with the Hill-equation and calculating e.g. EC20% or EC50% values, i.e. concentrations leading to 20% or 50% activation of the OR compared to the positive control.

[0462] In experiments without positive controls, e.g. in experiments with a library of receptors, other types of normalisation can be used. Thus, as the dynamic range (maximal efficacy) of different receptors can be quite different, it may be appropriate to use logarithmic values of fold-induction to report the data. Other options are normalisation to the highest fold-induction for each receptor when multiple samples are tested or normalisation to historical values of maximal efficacy for a given OR.

[0463] Other reporter genes which can also be coupled to a cAMP-responsive promoter/element include green fluorescent proteins. There are also multiple methods to directly measure the change in intracellular cAMP concentrations based on antibody binding to cAMP. Other methods to detect OR-activation include the coupling of a hybrid G-protein to the OR, whereby the hybrid G-protein activates the release of calcium from intracellular stores. Changes in calcium concentration are then measured either by chemical fluorescent probes sensitive to changed calcium concentrations, or by recombinant fluorescent or luminescent proteins which can sense differences in calcium concentrations.

[0464] Further means and methods for detection of activation of an olfactory receptor are known to the skilled person, including: GTPase/GTP binding assays, aequorin-based assays, fluorescence-based assays, membrane depolarization assays, melanophore assays, PKC activation assays, PKA activation assays, kinase assays, among others, for example as described in WO2019/110630 incorporated herein by reference in its entirety. An overview of some methods to detect activation of olfactory receptors in heterologous cells by odorants is given in the review by Veithen et al., 2017, Springer Handbook of Odor Chapter 22.2, Springer International publishing (CH) incorporated herein by reference in its entirety.

[0465] The ligand and/or test compound or composition as described herein may be added in an existing culture, or alternatively the culture medium of an existing culture may be replaced by fresh culture medium comprising said ligand. Suitable ligands may be selected from any chemical compound known in the art that is able to activate an olfactory receptor (alternatively referred to as “aroma compounds” or “odorants”), which are discussed in standard handbooks such as Buettner (2017), Springer Handbook of Odor, Springer International publishing (CH), incorporated herein by reference in its entirety. Suitable compounds may also be found in publicly available databases such as “OlfactionBase”, available at https://olfab.iiita.ac.in/olfactionbase/ and discussed in Sharma et al. OlfactionBase: a repository to explore odors, odorants, olfactory receptors and odorant-receptor interactions. Nucleic Acids Res. 2022 Jan. 7; 50(D1):D678-D686.

[0466] Non-limiting examples of suitable ligands include esters (e.g. geranyl acetate, methyl formate, methyl acetate, methyl propionate, methyl butyrate, ethyl acetate, ethyl butyrate, isoamyl acetate, pentyl butyrate, pentyl penthanoate, octyl acetate, benzyl acetate, methyl anthranilate, hexyl acetate), linear terpenes (e.g. myrcene, geraniol, nerol, citral, citronellal, citronellol, linalool, nerolidol, ocimene), cyclic terpenes (limonene, camphor, methol, carvone, terpineol, alpha-lonone, thujone, eucalyptol, jasmine), aromatic compounds (e.g. benzaldehyde, eugenol, isoeugenol, cinnamaldehyde, ethyl maltol, ethyl vanillin, anisole, anethole, estragole, thymol), amines (e.g. trimethylamine, putrescine, cadaverine, pyridine, indole, skatole), alcohols (e.g. furaneol, 1-hexanol, ethanol), aldehydes (e.g. acetaldehyde, hexanal, furfural, hexyl cinnamaldehyde, isovaleraldehyde, anisic aldehyde, cuminaldehyde), ketones (e.g. dihydrojasmone, 2-acetyl-1-pyrroline, 6-acetyl-2,3,4,5-tetrahydropyridine), lactones (e.g. gamma-decalactone, gamma-nonalactone, delta-octalactone, jasmine lactone, massoia lactone, wine lactone, sotolon), thiols (e.g. thioacetone, allyl thiol, ethanethiol, 2-methyl-2-propanethiol, butane-1-thiol, mercaptan, methanethiol, furan-2-ylmethanethiol, benzyl mercaptan), musks (e.g. nitromusks, polycyclic musks, macrocyclic musks, linear/alicyclic musks, musk ketone, musk ambrette, musk moskene, musk tibetene, musk xylene), cresols (e.g. vanilla cresol (ultravanil)), propenyl guaethol (vanitrope), carboxylic acids, and the like.

[0467] Preferred ligands include ligands with a musky, woody, lilly-of-the valley, floral, green, balsamic, spicy or fruity note. “Musky”, “Woody”, “lilly-of-the valley”, “floral”, “green”, “balsamic”, “spicy” and “fruity” are accepted terms of art in the context of odorant molecules. Ligands having musky, woody, lilly-of-the valley, floral, green, balsamic, spicy and/or fruity notes can be identified by the skilled person in publicly available databases such as “OlfactionBase”, available at https://olfab.iiita.ac.in/olfactionbase/and discussed in Sharma et al. OlfactionBase: a repository to explore odors, odorants, olfactory receptors and odorant-receptor interactions. Nucleic Acids Res. 2022 Jan. 7; 50(D1):D678-D686, incorporated herein by reference in its entirety. Relevant musk compounds are also described in WO2019/11630, incorporated herein by reference in its entirety.

[0468] Further examples of preferred ligands are ambermax, para-cresol, menthol, (S)-menthol, menthone, mahonial, nympheal, linalool, androstenone, androstenol, cyclopentanethiol, hedione, hedione HC, ambrofix, calone, 4-ethyloctanoic acid, galaxolide, galaxolide S, ethyl vanillin, beta-ionone, ambrettolide, 3-methyl-3-hydroxyhexanoic acid, 3-methyl-2-hexenoic acid, nonanoic acid, decanoic acid, undecanoic acid, ethyl 3-mercaptopropionate, diallyl disulfide, benzothiazole, 2-methyl-3-tetrahydrofuranethiol, muscone, dipropyl disulfide, musk ketone, arborone, georgywood, iso E super, cedrol, mercapto-8-p-menthane-3-one, 2-napthalenethiol, 3-(methylthio)propionaldehyde, 1,3-propanedithiol, benzothiazole, allyl sulfide, allyl mercaptan, hydroxy ethyl methyl thiazol, dimethyl trisulfide, thioglycolic acid, 3-mercapto-2-pentanone, 2-((methyldisulfanyl)methyl furan, bis(methylthio)methane, ethyl-2-mercaptopropionate, methyl thio butyrate, 3-mercapto-3-methylbutyl formate, methyl 3-mercaptopropionate, butyl 3-mercaptopropionate, 3-mercaptopropionic acid, dimethyl disulfide, 2-mercaptopropionic acid, 2-methyl-3-furanthiol, benzyl mercaptan, 2-mercapto-2-methyl-1 pentanol, allyl isothiocyanate, 2-mercapto butanone, 2-heptane-thiol, 2-methyl-3-tetrahydrofuranthiol, cis-2-isobutyl-4,5-dimethyl-2,5-dihydrothiazole, 3-methyl-3-sulfanylhexan-1-ol, (rac)-3-mercapto-2-methyl-1-pentanol, 1-hexanthiol, cyclolpentanethiol, 2-methyl-2-propanethiol, 2-methyl-3-(methyldithio)furan, 2-methyl-3-buten-1-ol, sodium methanethiolate, sodium hydrosulfide hydrate, 4-methoxy-2-methylpetane-2-thiol, blackcurrant body, furfuryl mercaptan, anjeruk, 3-mercaptohexyl acetate, methoxy methyl butanethiol, 3-mercaptohexanol, dimethyl sulfide, acetyl thiazole, mercapto-8 methene-1-para, 2-methyl-3-sulfanyl-pentanol, (E,S)-3,7-dimethylnon-6-en-1-ol, 3-Mercapto-3-methylhexan-1-ol, 7-(3-Methylbutyl)-benzo[b][1,4]dioxepin-3-one, benzyl salicylate, delta-damascone, ethyl cyclohexanecarboxylate, geosmin, 3-(4-isobutyl-2-methylphenyl)propanal, patchoulol, peonile, rotundone, heliotropine, methyl salicylate, galbanone, javanol, timberol, trans 2, cis 6-nonadienal, esterly, cascalone, azurone, rosabloom, rosyfolia, β-lonone, sotolone, 3-methyl-3-hydroxyhexanoic acid, 2-methylundecanoic acid.

[0469] The skilled person understands that the amount of ligand required for the activation of an olfactory receptor may vary depending on the olfactory receptor and the ligand's ability to physically associate with said olfactory receptor. A ligand may be considered to be “of” a given olfactory receptor (i.e. specific for that receptor) if it can physically associate (i.e. bind to) with said receptor at an EC0 value of 1 mM or less, typically at an EC0 value between 1 nM and 1 mM. EC₅₀ in the context of ligands of olfactory receptors refers to that concentration of a ligand at which a given activation of an olfactory receptor is 50% of the maximum for that olfactory receptor, measurable using methods as described elsewhere herein.

### ASPECTS AND EMBODIMENTS

[0470] Aspects and embodiments of the invention are set out in the numbered paragraphs below, which form an integral part of the description. Each of the features, aspects and embodiments recited below are further described in the description above.
[0471] 1. An olfactory receptor protein, wherein said protein has a modified C-terminal domain in which at least 32% of the amino acids is lysine, arginine, or histidine.
[0472] 2. An olfactory receptor protein, wherein said protein has a modified C-terminal domain in which at least 35% of the amino acids is lysine, arginine, or histidine.
[0473] 3. An olfactory receptor protein according to paragraph 1 or 2, wherein said protein has a modified C-terminal domain in which at least 38% of the amino acids is lysine, arginine, or histidine.
[0474] 4. An olfactory receptor protein according to any of the preceding paragraphs, wherein said protein has a modified C-terminal domain comprising the amino acid sequence motif RN[KR][EDQ][VMIL][KR]xA[LIV][KRH][KR][LI][LIF][KRG][KR][KR] (SEQ ID NO: 1).
[0475] 5. An olfactory receptor protein according to any of the preceding paragraphs, wherein said modified C-terminal domain is fused to the seventh transmembrane helix of the protein.
[0476] 6. An olfactory receptor protein according to any of the preceding paragraphs, wherein the protein is a class I or class II olfactory receptor with a modified C-terminal domain, preferably a human, dog or cat class I or class II olfactory receptor with a modified C-terminal domain, more preferably a human class I or class II olfactory receptor with a modified C-terminal domain.
[0477] 7. An olfactory receptor protein according to any of the preceding paragraphs, wherein the protein is a human class II or class I olfactory receptor selected from the group consisting of OR10A2, OR10A3, OR10A4, OR10A5, OR10A6, OR10A7, OR10AD1, OR10AG1, OR10C1, OR10D3, OR10G2, OR10G3, OR10G4, OR10G6, OR10G7, OR10G8, OR10G9, OR10H1, OR10H2, OR10H3, OR10H4, OR10H5, OR10J1, OR10J3, OR10J5, OR10K1, OR10K2, OR10P1, OR10P2, OR10Q1, OR10R2, OR10S1, OR10T2, OR10V1, OR10W1, OR10X1, OR10Z1, OR11A1, OR11G2, OR11H1, OR11H2, OR11H4, OR11H6, OR1111, OR12D2, OR12D3, OR13C2, OR13C3, OR13C4, OR13C5, OR13C8, OR13C9, OR13D1, OR13F1, OR13G1, OR13H1, OR13J1, OR14A16, OR14A2, OR14C36, OR1411, OR14L1P, OR1A1, OR1A2, OR1B1, OR1C1, OR1D2, OR1D4, OR1D5, OR1E1, OR1E2, OR1F1, OR1F12, OR1G1, OR1I1, OR1J1, OR1J2, OR1J4, OR1K1, OR111, OR1L3, OR1L4, OR1L6, OR1L8, OR1M1, OR1N1, OR1N2, OR1Q1, OR1S1, OR1S2, OR2A1, OR2A12, OR2A14, OR2A2, OR2A25, OR2A4, OR2A42, OR2A5, OR2A7, OR2A9P, ORAE1, OR2AG1, OR2AG2, OR2AJ1, OR2AK2, OR2AP1, OR2AT4, OR2B11, OR2B2, OR2B3, OR2B6, OR2B8P, OR2C1, OR2C3, OR2D2, OR2D3, OR2F1, OR2F2, OR2G2, OR2G3, OR2G6, OR2H1, OR2H2, OR2J1P, OR2J2, OR2J3, OR2K2, OR2L13, OR2L2, OR2L3, OR2L5, OR2L8, OR2M2, OR2M3, OR2M4, OR2M5, OR2M7, OR2S2, OR2T1, OR2T10, OR2T11, OR2T12, OR2T2, OR2T27, OR2T29, OR2T3, OR2T33, OR2T34, OR2T35, OR2T40R2T5, OR2T6, OR2T7, OR2T8, OR2V1, OR2V2, OR2W1, OR2W3, OR2W5, OR2Y1, OR2Z1, OR3A1, OR3A2, OR3A3, OR3A4, OR4A15, OR4A16, OR4A4, R4A47, OR4A5, OR4B1, OR4C11, OR4C12, OR4C13, OR4C15, OR4C16, OR4C, OR4C45, OR4C46, OR4C5, OR4C6, OR4D1, OR4D10, OR4D11, OR4D2, OR4D5, OR4D6, OR4D9, OR4E2, OR4F15, OR4F16, OR4F17, OR4F21, OR4F29, OR4F3, OR4F4, OR4F5, OR4F6, OR4K1, OR4K13, OR4K14, OR4K15, OR4K17, OR4K2, OR4K3P, OR4K5, OR4L1, OR4M1, OR4M2, OR4N2, OR4N4, OR4N5, OR4P4, OR4Q3, OR4S1, OR4S2, OR4X1, OR4X2, OR51A2, OR51A4, OR51A7, OR51B2, OR51B4, OR51B5, OR51B6, OR51D1, OR51E1, OR51E2, OR51F1, OR51F2, OR51G1, OR51G2, OR51H1P, OR5111, OR5112, OR51J1, OR51L1, OR51M1, OR51Q1, OR51S1, OR51T1, OR51V1, OR52A1, OR52A4, OR52A5, OR52B2, OR52B4, OR52B6, OR52D1, OR52E2, OR52E4, OR52E5, OR52E6, OR52E8, OR52H1, OR5211, OR5212, OR52J3, OR52K1, OR52K2, OR52L1, OR52M1, OR52N1, OR52N2, OR52N4, OR52N5, OR52P1P, OR52R1, OR52W1, OR56A1, OR56A3, OR56A4, OR56A5, OR56B1, OR56B4, OR5A1, OR5A2, OR5AC2, OR5AK2, OR5AL1P, OR5AN1, OR5AP2, OR5AR1, OR5AS1, OR5AU1, OR5B12, OR5B17, OR5B2, OR5B21, OR5B3, OR5C1, OR5D13, OR5D14, OR5D16, OR5D18, OR5F1, OR5H1, OR5H14, OR5H15, OR5H2, OR5H6, OR5I1, OR5J2, OR5K1, OR5K2, OR5K3, OR5K4, OR5L1, OR5L2, OR5M1, OR5M10, OR5M11, OR5M3, OR5M8, OR5M9, OR5P2, OR5P3, OR5R1, OR5T1, OR5T2, OR5T3, OR5V1, OR5W2, OR6A2, OR6B1, OR6B2, OR6B3, OR6C1, OR6C2, OR6C3, OR6C4, OR6C6, OR6C65, OR6C68, OR6C70, OR6C74, OR6C75, OR6C76, OR6F1, OR6J1, OR6K2, OR6K3, OR6K6, OR6M1, OR6N1, OR6N2, OR6P1, OR6Q1, OR6S1, OR6T1, OR6X₁, OR6Y1, OR7A10, OR7A17, OR7A5, OR7C1, OR7C2, OR7D2, OR7D4, OR7E24, OR7G1, OR7G2, OR7G3, OR8A1, OR8B12, OR8B2, OR8B3, OR8B4, OR8B8, OR8D1, OR8D2, OR8D4, OR8G1, OR8G5, OR8H1, OR8H2, OR8H3, OR812, OR8J1, OR8J3, OR8K1, OR8K3, OR8K5, OR8S1, OR8U1, OR8U8, OR8U9, OR9A2, OR9A4, OR9G1, OR9G4, OR9G9, OR911, OR9K2, OR9Q1, OR9Q2, or a variant thereof.
[0478] 8. An olfactory receptor protein according to any of the preceding paragraphs, wherein the class II receptor is selected from the group consisting of OR7C1, OR9Q2, OR8K3, OR10J5, OR1C1, OR7D4, OR2T4, OR5B112, OR7A17, OR10H5, OR5A1, OR5A2, OR1N2, OR2C1, OR2T11, OR2M2, OR4S2, OR2V1, OR5P3, OR6P1, OR2L2, OR10G7, OR5AN1, OR5V1, OR2L3, OR2AG2, OR7A5, OR7E24, OR7A10, OR10H2, OR10H1, OR10D3, OR1D2, OR2A5, OR2A25, OR11G2, OR14J1, OR5M3, OR8D1, OR10G3, OR10G9, OR2L5, OR8H1, OR10K1, OR11A1, OR2AK2, OR10A3, OR10A6, OR10J1, and OR2J2, preferably wherein the class II receptor is selected from the group consisting of OR7A17, OR7C1, OR2A25, OR7E24, OR10H1, OR10K1, OR2AG2, OR10H2, OR10H5, OR10D3, OR14J1, OR7A10, OR2L5, OR2M2 and OR5A2.
[0479] 9. An olfactory receptor protein according to any one of paragraphs 1-7, wherein the class I receptor is selected from the group consisting of OR52A5, OR52E8, OR56A4, OR51B2 (preferably OR51B2(C120R, L134F, C209S)), OR52K1, OR56A1, OR51B5, OR56A3, and OR51 L1.
[0480] 10. An olfactory receptor protein according to any one of paragraphs 4-9, wherein the sequence motif is RN[KR]E[VMI][KR]xA[LIV][KR][KR]L[LIF][KR][KR][KR] (SEQ ID NO: 5).
[0481] 11. An olfactory receptor protein according to any one of paragraphs 4-10, wherein the sequence motif is selected from the group consisting of:
[0482] RNX₁X₂X₃X₄X_{5″″}AX₆X₇X₈JX₁₀X₁₁X₁₂X₁₃ (SEQ ID NO: 311),
[0483] RNX₁EX_{3′}X₄X_{5″″}AX₆X_{7′}X₈LX₁₀X_{11′}X₁₂X₁₃ (SEQ ID NO: 312),
[0484] RNKEVKX_{5″″}ALKRLLKRK (SEQ ID NO: 319),
[0485] RNX₁X₂X₃X₄KAX₆X₇X₈JX₁₀X₁₁X₁₂X₁₃ (SEQ ID NO: 820),
[0486] RNX₁EX_{3′}X₄KAX₆X_{7′}X₈LX₁₀X_{11′}X₁₂X₁₃ (SEQ ID NO: 821), and;
[0487] RNX₁QIRX₅AX₆X₇X₈JX₁₀X₁₁X₁₂X₁₃ (SEQ ID NO: 824), wherein:
   [0488] X₁ is K or R;
   [0489] X₂ is E or D or Q;
   [0490] X₃ is V or M or I or L;
   [0491] X_{3′} is V or M or 1;
   [0492] X₄ is K or R;
   [0493] X₅ is any amino acid;
   [0494] X_{5″″} is D or K or E or N or R or V or A or Q or G or C or F or H or I or L or M or S or T or W or Y;
   [0495] X₆ is L or I or V;
   [0496] X₇ is K or R or H;
   [0497] X_{7′} is K or R;
   [0498] X₃ is K or R;
   [0499] X₁₀ is L or I or F;
   [0500] X₁₁ is K or R or G;
   [0501] X_{11′} is K or R;
   [0502] X₁₂ is K or R; and
   [0503] X₁₃ is K or R.
[0504] 12. An olfactory receptor protein according to any one of paragraphs 4-11, wherein x or X₅ is not proline.
[0505] 13. An olfactory receptor protein according to any one of paragraphs 4-11, wherein x is not proline or tryptophane.
[0506] 14. An olfactory receptor protein according to any one of 4-13, wherein x, X₅, or X_{5″″} is selected from D, K, R, E, N, V, A, Q or G, preferably wherein x, X₅, or X_{5″″} is selected from D, K, R, E, N, V, A or Q.
[0507] 15. An olfactory receptor protein according to any one of paragraphs 4-14, wherein the amino acid sequence motif comprises 1 to 6 additional C-terminal amino acid residues, optionally wherein:
   [0508] the first additional amino acid residue is selected from C, R, K, E, G, H, F, P, Y, W, M and N, preferably the first additional amino acid residue is selected from C, R, K, E, G, H, F, P, Y, more preferably the first additional amino acid residue is C; R or K, most preferably C;
   [0509] the second additional amino acid residue is selected from C, R, K, N, G, I, L, F, P, T, Y and Q, preferably the second additional amino acid residue is selected from C, R, K, N, G, I, L, F, P, T and Y, more preferably the second additional amino acid residue is C, R or K, most preferably C or R;
   [0510] the third additional amino acid residue is selected from R, K, C, L, F, M, Y, A, P, S, G, H, and N, preferably the third additional amino acid residue is selected from R, K, C, L, F, M, Y, A, P, S and G, more preferably the third additional amino acid residue is R or K;
   [0511] the fourth, fifth and sixth additional amino acid residues are selected from K and R.
[0512] 16. An olfactory receptor protein according to paragraph 15, wherein the amino acid sequence motif comprises additional C-terminal amino acid residues selected from the group consisting of:
   [0513] CC, SI, YP, PQ, FR, CR, RR, EK, PR, CG, FK, RG, RC, RT, RF, GG, YR, GC, TG, PC, HP, PG, KY, CP, YY, FF, CF, NP, YL, IC, HC, CL, YC, ER, RP, PA, FC, RY;
   [0514] CRR, CCC, CCF, CCL, CCM, CCS, CCP, CCA, CCY, CCH, CCN, CCD, CCK, CCR, CCG;
   [0515] CRRR (SEQ ID NO: 159), CRKK (SEQ ID NO: 160), CCRR (SEQ ID NO: 161), CCRK (SEQ ID NO: 228), CCKR (SEQ ID NO: 229),
   [0516] CRRRR (SEQ ID NO: 162), CCRRR (SEQ ID NO: 163). CCKRR (SEQ ID NO: 230), CCRKR (SEQ ID NO: 231), CCRRK (SEQ ID NO: 232), CCRKK (SEQ ID NO: 233), CCKRK (SEQ ID NO: 234), CCKKR (SEQ ID NO: 235), CCKKK (SEQ ID NO: 236),
   [0517] CRRRRR (SEQ ID NO: 164), CRRRKK (SEQ ID NO: 165), and CCRRRR (SEQ ID NO: 224), preferably wherein the amino acid sequence motif comprises additional C-terminal amino acid residues selected from the group consisting of CC, CCR, CCRR (SEQ ID NO: 161), CCRRR (SEQ ID NO: 163), CCRRRR (SEQ ID NO: 224), CR, CRR, CRRR (SEQ ID NO: 159), CRKK (SEQ ID NO: 160), CRRRR (SEQ ID NO: 162), CRRRRR (SEQ ID NO: 164), and CRRRKK (SEQ ID NO: 165).
[0518] 17. An olfactory receptor protein according to paragraph 15 or 16, wherein the sequence motif is selected from the group consisting of:

(SEQ ID NO: 320)
RNKEVKX_{5″″}ALKRLLKRKCC,
(SEQ ID NO: 822)
RNX₁X₂X₃X₄KAX₆X₇X₈JX₁₀X₁₁X₁₂X₁₃CC,
(SEQ ID NO: 823)
RNX₁EX₃X₄KAX₆X₇X₈LX₁₀X₁₁X₁₂X₁₃CC,
(SEQ ID NO: 825)
RNX₁X₂X₃X₄X₅AX₆X₇X₈JX₁₀X₁₁X₁₂X₁₃CCRRR,
and
(SEQ ID NO: 826)
RNX₁QIRX₅AX₆X₇X₈JX₁₀X₁₁X₁₂X₁₃CCRRR,

[0519] 18. An olfactory receptor protein according to any one of paragraphs 4-17, wherein the sequence motif is selected from the group consisting of:

(SEQ ID NO: 10)
RNKEVKDALKRLLKRK,
(SEQ ID NO: 11)
RNREVKDALKRLLKRK,
(SEQ ID NO: 12)
RNKEIKDALKRLLKRK,
(SEQ ID NO: 13)
RNKEMKDALKRLLKRK,
(SEQ ID NO: 14)
RNKEVRDALKRLLKRK,
(SEQ ID NO: 15)
RNKEVKKALKRLLKRK,
(SEQ ID NO: 16)
RNKEVKEALKRLLKRK,
(SEQ ID NO: 17)
RNKEVKNALKRLLKRK,
(SEQ ID NO: 18)
RNKEVKRALKRLLKRK,
(SEQ ID NO: 19)
RNKEVKVALKRLLKRK,
(SEQ ID NO: 20)
RNKEVKAALKRLLKRK,
(SEQ ID NO: 21)
RNKEVKQALKRLLKRK,
(SEQ ID NO: 22)
RNKEVKDAVKRLLKRK,
(SEQ ID NO: 23)
RNKEVKDAIKRLLKRK,
(SEQ ID NO: 24)
RNKEVKDALRRLLKRK,
(SEQ ID NO: 25)
RNKEVKDALKKLLKRK,
(SEQ ID NO: 26)
RNKEVKDALKRLIKRK,
(SEQ ID NO: 27)
RNKEVKDALKRLFKRK,
(SEQ ID NO: 28)
RNKEVKDALKRLLRRK,
(SEQ ID NO: 29)
RNKEVKDALKRLLKKK,
(SEQ ID NO: 30)
RNKEVKDALKRLLKRR,
(SEQ ID NO: 31)
RNKDVKDALKRLLKRK,
(SEQ ID NO: 32)
RNKQVKDALKRLLKRK,
(SEQ ID NO: 33)
RNKELKDALKRLLKRK,
(SEQ ID NO: 34)
RNKEVKGALKRLLKRK,
(SEQ ID NO: 35)
RNKEVKDALHRLLKRK,
(SEQ ID NO: 36)
RNKEVKDALKRILKRK,
(SEQ ID NO: 37)
RNKEVKDALKRLLGRK,
(SEQ ID NO: 38)
RNKEVKRAIKRLLKRK,
(SEQ ID NO: 39)
RNKEVKKAIKRLLKRK,
(SEQ ID NO: 40)
RNKEVKRAIKRLFKRK,
(SEQ ID NO: 41)
RNKEVKKAIKRLFKRK,
(SEQ ID NO: 42)
RNKEVKRAIRKLLKRK,
(SEQ ID NO: 43)
RNKEVKDALRKLLKRK,
(SEQ ID NO: 44)
RNKEVKDALKRLLRRR,
(SEQ ID NO: 45)
RNKEVKRALKRLLRRR
(SEQ ID NO: 46)
RNKEVKKALKRLLRRR
(SEQ ID NO: 47)
RNREVKRAIKRLLKRK
(SEQ ID NO: 48)
RNREVKKAIKRLLKRK
(SEQ ID NO: 49)
RNREVKRAIKRLFKRK
(SEQ ID NO: 50)
RNREVKKAIKRLFKRK
(SEQ ID NO: 51)
RNREVKRAIRKLLKRK
(SEQ ID NO: 52)
RNREVKDALRKLLKRK
(SEQ ID NO: 53)
RNREVKDALKRLLRRR
(SEQ ID NO: 54)
RNKEVKKAIKRLLRRK
(SEQ ID NO: 55)
RNKEVKKAIKRLLKKK
(SEQ ID NO: 56)
RNKEVKKAIKRLLKRR
(SEQ ID NO: 57)
RNKEVKRAIKRLLRRK
(SEQ ID NO: 58)
RNKEVKRAIKRLLKKK
(SEQ ID NO: 59)
RNKEVKRAIKRLLKRR
(SEQ ID NO: 60)
RNKEVKKAIKRLFRRK
(SEQ ID NO: 61)
RNKEVKKAIKRLFKKK
(SEQ ID NO: 62)
RNKEVKKAIKRLFKRR
(SEQ ID NO: 63)
RNKEVKRAIKRLFRRK
(SEQ ID NO: 64)
RNKEVKRAIKRLFKKK
(SEQ ID NO: 65)
RNKEVKRAIKRLFKRR
(SEQ ID NO: 66)
RNREVKRAIKRLLRKK
(SEQ ID NO: 67)
RNREVKKAIKRLLRKK
(SEQ ID NO: 68)
RNREVKRAIKRLFRRR
(SEQ ID NO: 69)
RNREVKKAIKRLFRRR
(SEQ ID NO: 70)
RNREVKKAIKRLFRRK
(SEQ ID NO: 71)
RNREVKKAIKRLFKKK
(SEQ ID NO: 72)
RNREVKKAIKRLFKRR
(SEQ ID NO: 73)
RNREVKRAIKRLFRRK
(SEQ ID NO: 74)
RNREVKRAIKRLFKKK
(SEQ ID NO: 75)
RNREVKRAIKRLFKRR
(SEQ ID NO: 828)
RNREVKKAIHKLIGRK,
(SEQ ID NO: 829)
RNREVRKAVHRLFKRK,
(SEQ ID NO: 830)
RNKEMKKAIHKLFGKK,
(SEQ ID NO: 831)
RNRDVKKAVHKLFRRK,
(SEQ ID NO: 832)
RNRDMKKAVHKLFGKR,
(SEQ ID NO: 833)
RNKELRKALHKLLGRK,
(SEQ ID NO: 834)
RNRDVRKALRRILRRR,
(SEQ ID NO: 835)
RNKDVRKAVRKLIRRR,
(SEQ ID NO: 836)
RNRDVRKAVRRLFRKR,
(SEQ ID NO: 837)
RNKDIKKAVKKLIKKK,
(SEQ ID NO: 838)
RNRELRKAVRRLFKRR,
(SEQ ID NO: 839)
RNKELRKAVRKIIKKK,
(SEQ ID NO: 840)
RNRDVKKAVRRLFRRK,
(SEQ ID NO: 841)
RNREVRKALRRIIRKR,
(SEQ ID NO: 842)
RNKDIRKAVKKIFRRK,
(SEQ ID NO: 843)
RNKDVRKAVRRLIKRK,
(SEQ ID NO: 844)
RNRDLRKAVRKLFKKK,
(SEQ ID NO: 845)
RNRDLRKALRRIFKRR,
(SEQ ID NO: 846)
RNRDVRKAIKKLIRKR,
(SEQ ID NO: 847)
RNKELKKAIKRILKKK,
(SEQ ID NO: 848)
RNRDVRKAIRKLLKRK,
(SEQ ID NO: 849)
RNRDLRKAVRRIFKKR,
(SEQ ID NO: 850)
RNRDVRKAVRKLFKRR,
(SEQ ID NO: 851)
RNRDVRKALRRLFKKR,
(SEQ ID NO: 852)
RNKELKKALRKLIGKK,
(SEQ ID NO: 853)
RNREMRKAIKKIIKKK,
(SEQ ID NO: 854)
RNKEIKKAIKKIIKKR,
(SEQ ID NO: 855)
RNRDVKKAIRRLFRRR,
(SEQ ID NO: 856)
RNREVKKAVKKLIGKR,
(SEQ ID NO: 857)
RNREMRKALRRLFRKR,
(SEQ ID NO: 858)
RNKELKKALRRLIGRR,
(SEQ ID NO: 859)
RNRDVKKALRKLIGKR,
(SEQ ID NO: 860)
RNREVKKAVKKLIRRK,
(SEQ ID NO: 861)
RNKEVRKALKKLFGKK,
(SEQ ID NO: 862)
RNKEIRKALRRLFGKK,
(SEQ ID NO: 863)
RNKDVKKALRRLFGKK,
(SEQ ID NO: 864)
RNKELKKAIKRLIRRK,
(SEQ ID NO: 865)
RNKDVRKAVKRLLKKR,
(SEQ ID NO: 866)
RNKELRKAIRRLLRRR,
(SEQ ID NO: 867)
RNRDIRKALRKLFKKK,
(SEQ ID NO: 868)
RNRELKKALRRLLRRR,
(SEQ ID NO: 869)
RNREVKKALRRLFGKK,
(SEQ ID NO: 870)
RNRDVRKALKRLLKRK,
(SEQ ID NO: 871)
RNRDMRKAIRKLFGRK,
(SEQ ID NO: 872)
RNRELKKAIRKLLKRK,
(SEQ ID NO: 873)
RNRDIRKAVKKLFGKK,
(SEQ ID NO: 874)
RNKEVKKAIRKLFGRR,
(SEQ ID NO: 875)
RNREVRKAVRKLFRRK,
(SEQ ID NO: 876)
RNRDMKKALKKLFRRR,
(SEQ ID NO: 877)
RNRDVRKALKRLLGRR,
(SEQ ID NO: 878)
RNKDLKKAVKKLFGRK,
(SEQ ID NO: 879)
RNKDVRKAVRRLFGRR,
(SEQ ID NO: 880)
RNKEVKCALKRLLKRK,
(SEQ ID NO: 881)
RNKEVKFALKRLLKRK,
(SEQ ID NO: 882)
RNKEVKHALKRLLKRK,
(SEQ ID NO: 883)
RNKEVKIALKRLLKRK,
(SEQ ID NO: 884)
RNKEVKLALKRLLKRK,
(SEQ ID NO: 885)
RNKEVKMALKRLLKRK,
(SEQ ID NO: 886)
RNKEVKSALKRLLKRK,
(SEQ ID NO: 887)
RNKEVKTALKRLLKRK,
(SEQ ID NO: 888)
RNKEVKWALKRLLKRK,
(SEQ ID NO: 889)
RNKEVKYALKRLLKRK,
(SEQ ID NO: 890)
RNKQIRDALKRLLKRK.
(SEQ ID NO: 86)
RNKEVKDALKRLLKRKCC,
(SEQ ID NO: 87)
RNREVKDALKRLLKRKCC,
(SEQ ID NO: 88)
RNKEIKDALKRLLKRKCC,
(SEQ ID NO: 89)
RNKEMKDALKRLLKRKCC,
(SEQ ID NO: 90)
RNKEVRDALKRLLKRKCC,
(SEQ ID NO: 91)
RNKEVKKALKRLLKRKCC,
(SEQ ID NO: 92)
RNKEVKEALKRLLKRKCC,
(SEQ ID NO: 93)
RNKEVKNALKRLLKRKCC,
(SEQ ID NO: 94)
RNKEVKRALKRLLKRKCC,
(SEQ ID NO: 95)
RNKEVKVALKRLLKRKCC,
(SEQ ID NO: 96)
RNKEVKAALKRLLKRKCC,
(SEQ ID NO: 97)
RNKEVKQALKRLLKRKCC,
(SEQ ID NO: 98)
RNKEVKDAVKRLLKRKCC,
(SEQ ID NO: 99)
RNKEVKDAIKRLLKRKCC,
(SEQ ID NO: 100)
RNKEVKDALRRLLKRKCC,
(SEQ ID NO: 101)
RNKEVKDALKKLLKRKCC,
(SEQ ID NO: 102)
RNKEVKDALKRLIKRKCC,
(SEQ ID NO: 103)
RNKEVKDALKRLFKRKCC,
(SEQ ID NO: 104)
RNKEVKDALKRLLRRKCC,
(SEQ ID NO: 105)
RNKEVKDALKRLLKKKCC,
(SEQ ID NO: 106)
RNKEVKDALKRLLKRRCC,
(SEQ ID NO: 107)
RNKDVKDALKRLLKRKCC,
(SEQ ID NO: 108)
RNKQVKDALKRLLKRKCC,
(SEQ ID NO: 109)
RNKELKDALKRLLKRKCC,
(SEQ ID NO: 110)
RNKEVKGALKRLLKRKCC,
(SEQ ID NO: 111)
RNKEVKDALHRLLKRKCC,
(SEQ ID NO: 112)
RNKEVKDALKRILKRKCC,
(SEQ ID NO: 113)
RNKEVKDALKRLLGRKCC,
(SEQ ID NO: 114)
RNKEVKRAIKRLLKRKCC,
(SEQ ID NO: 115)
RNKEVKKAIKRLLKRKCC,
(SEQ ID NO: 116)
RNKEVKRAIKRLFKRKCC,
(SEQ ID NO: 117)
RNKEVKKAIKRLFKRKCC,
(SEQ ID NO: 118)
RNKEVKRAIRKLLKRKCC,
(SEQ ID NO: 119)
RNKEVKDALRKLLKRKCC,
(SEQ ID NO: 120)
RNKEVKDALKRLLRRRCC,
(SEQ ID NO: 254)
RNREMRKALHRLLGKKCC,
(SEQ ID NO: 255)
RNREVKKAIHKLIGRKCC,
(SEQ ID NO: 256)
RNREVRKAVHRLFKRKCC,
(SEQ ID NO: 257)
RNKEMKKAIHKLFGKKCC,
(SEQ ID NO: 258)
RNRDVKKAVHKLFRRKCC,
(SEQ ID NO: 259)
RNRDMKKAVHKLFGKRCC,
(SEQ ID NO: 260)
RNKELRKALHKLLGRKCC,
(SEQ ID NO: 261)
RNRDVRKALRRILRRRCC,
(SEQ ID NO: 262)
RNKDVRKAVRKLIRRRCC,
(SEQ ID NO: 263)
RNRDVRKAVRRLFRKRCC,
(SEQ ID NO: 264)
RNKDIKKAVKKLIKKKCC,
(SEQ ID NO: 265)
RNRELRKAVRRLFKRRCC,
(SEQ ID NO: 266)
RNKELRKAVRKIIKKKCC,
(SEQ ID NO: 267)
RNRDVKKAVRRLFRRKCC,
(SEQ ID NO: 268)
RNREVRKALRRIIRKRCC,
(SEQ ID NO: 269)
RNKDIRKAVKKIFRRKCC,
(SEQ ID NO: 270)
RNKDVRKAVRRLIKRKCC,
(SEQ ID NO: 271)
RNRDLRKAVRKLFKKKCC,
(SEQ ID NO: 272)
RNRDLRKALRRIFKRRCC,
(SEQ ID NO: 273)
RNRDVRKAIKKLIRKRCC,
(SEQ ID NO: 274)
RNKELKKAIKRILKKKCC,
(SEQ ID NO: 275)
RNRDVRKAIRKLLKRKCC,
(SEQ ID NO: 276)
RNRDLRKAVRRIFKKRCC,
(SEQ ID NO: 277)
RNRDVRKAVRKLFKRRCC,
(SEQ ID NO: 278)
RNRDVRKALRRLFKKRCC,
(SEQ ID NO: 279)
RNKELKKALRKLIGKKCC,
(SEQ ID NO: 280)
RNREMRKAIKKIIKKKCC,
(SEQ ID NO: 281)
RNKEIKKAIKKIIKKRCC,
(SEQ ID NO: 282)
RNRDVKKAIRRLFRRRCC,
(SEQ ID NO: 283)
RNREVKKAVKKLIGKRCC,
(SEQ ID NO: 284)
RNREMRKALRRLFRKRCC,
(SEQ ID NO: 285)
RNKELKKALRRLIGRRCC,
(SEQ ID NO: 286)
RNRDVKKALRKLIGKRCC,
(SEQ ID NO: 287)
RNREVKKAVKKLIRRKCC,
(SEQ ID NO: 288)
RNKEVRKALKKLFGKKCC,
(SEQ ID NO: 289)
RNKEIRKALRRLFGKKCC,
(SEQ ID NO: 290)
RNKDVKKALRRLFGKKCC,
(SEQ ID NO: 291)
RNKELKKAIKRLIRRKCC,
(SEQ ID NO: 292)
RNKDVRKAVKRLLKKRCC,
(SEQ ID NO: 293)
RNKELRKAIRRLLRRRCC,
(SEQ ID NO: 294)
RNRDIRKALRKLFKKKCC,
(SEQ ID NO: 295)
RNRELKKALRRLLRRRCC,
(SEQ ID NO: 296)
RNREVKKALRRLFGKKCC,
(SEQ ID NO: 297)
RNRDVRKALKRLLKRKCC,
(SEQ ID NO: 298)
RNRDMRKAIRKLFGRKCC,
(SEQ ID NO: 299)
RNRELKKAIRKLLKRKCC,
(SEQ ID NO: 300)
RNRDIRKAVKKLFGKKCC,
(SEQ ID NO: 301)
RNKEVKKAIRKLFGRRCC,
(SEQ ID NO: 302)
RNREVRKAVRKLFRRKCC,
(SEQ ID NO: 303)
RNRDMKKALKKLFRRRCC,
(SEQ ID NO: 304)
RNRDVRKALKRLLGRRCC,
(SEQ ID NO: 305)
RNKDLKKAVKKLFGRKCC,
(SEQ ID NO: 306)
RNKDVRKAVRRLFGRRCC,
(SEQ ID NO: 309)
RNRDVRKALRRLFRKKCC,
(SEQ ID NO: 310)
RNRDVRRALRRLFRKKCC,
(SEQ ID NO: 321)
RNKEVKCALKRLLKRKCC,
(SEQ ID NO: 322)
RNKEVKFALKRLLKRKCC,
(SEQ ID NO: 323)
RNKEVKHALKRLLKRKCC,
(SEQ ID NO: 324)
RNKEVKIALKRLLKRKCC,
(SEQ ID NO: 325)
RNKEVKLALKRLLKRKCC,
(SEQ ID NO: 326)
RNKEVKMALKRLLKRKCC,
(SEQ ID NO: 328)
RNKEVKSALKRLLKRKCC,
(SEQ ID NO: 329)
RNKEVKTALKRLLKRKCC,
(SEQ ID NO: 330)
RNKEVKWALKRLLKRKCC,
(SEQ ID NO: 331)
RNKEVKYALKRLLKRKCC,
(SEQ ID NO: 740)
RNKQIRDALKRLLKRKCC,
(SEQ ID NO: 121)
RNKEVKRAIKRLLKRKCR,
(SEQ ID NO: 122)
RNKEVKKAIKRLLKRKCR,
(SEQ ID NO: 123)
RNKEVKRALKRLLKRKRR,
(SEQ ID NO: 124)
RNKEVKRALKRLLKRKYP,
(SEQ ID NO: 125)
RNKEVKRALKRLLKRKRF,
(SEQ ID NO: 126)
RNKEVKRALKRLLKRKFK,
(SEQ ID NO: 127)
RNKEVKKALKRLLKRKRR,
(SEQ ID NO: 128)
RNKEVKKALKRLLKRKYP,
(SEQ ID NO: 129)
RNKEVKKALKRLLKRKRF,
(SEQ ID NO: 130)
RNKEVKKALKRLLKRKFK,
(SEQ ID NO: 133)
RNKEVKDALKRLLKRKCRR,
(SEQ ID NO: 134)
RNKEVKDALKRLLKRKCCC,
(SEQ ID NO: 135)
RNKEVKDALKRLLKRKCCF,
(SEQ ID NO: 136)
RNKEVKDALKRLLKRKCCL,
(SEQ ID NO: 137)
RNKEVKDALKRLLKRKCCM,
(SEQ ID NO: 138)
RNKEVKDALKRLLKRKCCS,
(SEQ ID NO: 139)
RNKEVKDALKRLLKRKCCP,
(SEQ ID NO: 140)
RNKEVKDALKRLLKRKCCA,
(SEQ ID NO: 141)
RNKEVKDALKRLLKRKCCY,
(SEQ ID NO: 142)
RNKEVKDALKRLLKRKCCH,
(SEQ ID NO: 143)
RNKEVKDALKRLLKRKCCN,
(SEQ ID NO: 144)
RNKEVKDALKRLLKRKCCD,
(SEQ ID NO: 145)
RNKEVKDALKRLLKRKCCK,
(SEQ ID NO: 146)
RNKEVKDALKRLLKRKCCR,
(SEQ ID NO: 147)
RNKEVKDALKRLLKRKCCG,
(SEQ ID NO: 149)
RNKEVKDALKRLLKRKCRRR,
(SEQ ID NO: 150)
RNKEVKDALKRLLKRKCRKK,
(SEQ ID NO: 151)
RNKEVKDALKRLLKRKCCRR,
(SEQ ID NO: 154)
RNKEVKDALKRLLKRKCRRRR,
(SEQ ID NO: 156)
RNKEVKDALKRLLKRKCCRRR,
(SEQ ID NO: 220)
RNKEVKKAIKRLLKRKCCRRR,
(SEQ ID NO: 237)
RNKEVKRAIKRLLKRKCCRRR,
(SEQ ID NO: 221)
RNKEVKKAIKRLFKRKCCRRR,
(SEQ ID NO: 238)
RNKEVKRAIKRLFKRKCCRRR,
(SEQ ID NO: 741)
RNKQIRDALKRLLKRKCCRRR,
(SEQ ID NO: 157)
RNKEVKDALKRLLKRKCRRRRR,
(SEQ ID NO: 158)
RNKEVKDALKRLLKRKCRRRKK,
and
(SEQ ID NO: 219)
RNKEVKDALKRLLKRKCCRRRR.

[0520] 19. An olfactory receptor protein according to any one of paragraphs 4-17, wherein the sequence motif is RNRDVRKALRRLFRKK (SEQ ID NO: 307) or RNRDVRRALRRLFRKK (SEQ ID NO: 308).
[0521] 20. An olfactory receptor protein according to any one of paragraphs 4-18, wherein the sequence motif is RNKEVKKAIKRLFKRKCCRRR (SEQ ID NO: 221) or RNKQIRDALKRLLKRKCCRRR (SEQ ID NO: 741).
[0522] 21. An olfactory receptor protein according to any one of paragraphs 4-20, wherein the sequence motif is selected from the group consisting of SEQ ID NOs: 1, 5-75, 86-130, 133-147, 149-151, 154, 156-158, 166, 167, 198, 219-221, 254-312, 319-326, 328-331, 740-741, and 820-890.
[0523] 22. An olfactory receptor protein according to any of the preceding paragraphs, wherein the olfactory receptor further comprises an N-terminal tag peptide, preferably wherein the N-terminal tag peptide is selected from the group consisting of a FLAG tag, a rhodopsin (Rho) tag, an SST₃ tag, and an M₃ tag.
[0524] 23. A nucleic acid molecule comprising a nucleotide sequence encoding an olfactory receptor protein as described in any of the precedings paragraphs.
[0525] 24. A nucleic acid molecule according to paragraph 23, further comprising a promoter sequence, preferably a constitutive promoter sequence.
[0526] 25. A nucleic acid molecule according to paragraph 23 or 24, further comprising a terminator sequence.
[0527] 26. A nucleic acid molecule according to any one of paragraphs 23-25, further comprising a nucleotide sequence encoding an N-terminal signal peptide, preferably a leucine-rich signal peptide, such as

(SEQ ID NO: 76)
MRPQILLLLALLTLGLA
or
(SEQ ID NO: 77)
MSHQILLLLALLTLGLA.

[0528] 27. A nucleic acid molecule according to any one of paragraphs 23-26, wherein the nucleotide sequence comprises at least 60%, at least 61%, at least 62%, at least 63%, at least 64%, at least 65%, at least 66%, at least 67%, at least 68%, at least 69%, at least 70%, at least 71%, at least 72%, at least 73%, at least 74%, at least 75%, at least 76%, at least 77%, at least 78%, at least 79%, at least 80%, at least 81%, at least 82%, at least 83%, at least 84%, at least 85%, at least 86%, at least 87%, at least 88%, at least 89%, at least 90%, at least 91%, at least 92%, at least 93%, at least 94%, at least 95%, at least 96%, at least 97%, at least 98%, at least 99% or 100% sequence identity with a sequence selected from the group consisting of SEQ ID NOs 331-739 and SEQ ID NOs: 742-819.
[0529] 28. An expression vector comprising a nucleic acid molecule as described in any one of paragraphs 23-27.
[0530] 29. An expression vector according to paragraph 28, wherein the expression vector is a plasmid.
[0531] 30. A recombinant host cell comprising a nucleic acid molecule as described in any one of paragraphs 23 to 27 or an expression vector as described in paragraph 28 or 29, preferably wherein the cell expresses an olfactory receptor protein as described in any one of paragraphs 1-22.
[0532] 31. A recombinant host cell according to paragraph 30, wherein the cell further expresses one or more olfactory receptor accessory proteins.
[0533] 32. A recombinant host cell according to paragraph 31, wherein the one or more olfactory receptor accessory proteins are selected from the group consisting of RTP1, RTP1 S, RTP2, REEP, β-adrenergic receptor, heat shock protein 70, Ric8b, Gα_{olf}, Giα, and functional variants thereof, preferably selected from the group consisting of RTP1 S, RTP2 and functional variants thereof.
[0534] 33. A recombinant host cell according to any one of paragraphs 30-32, wherein the cell is a HEK293 or HEK293T cell.
[0535] 34. A library comprising a diverse repertoire of olfactory receptor proteins as described in any one of paragraphs 1-22, nucleic acid molecules as described in any one of paragraphs 23-27, expression vectors as described in paragraph 28 or 29, or recombinant host cells as described in any one of paragraphs 30-33.
[0536] 35. A library according to paragraph 34, wherein the diverse repertoire of olfactory receptor proteins, of olfactory receptor proteins encoded by the nucleic acid molecules or expression vectors, or of olfactory receptor proteins expressed by the recombinant host cells, shares the same modified C-terminal domain.
[0537] 36. A library according to paragraph 34 or 35, wherein the library comprises at least 25 (preferably 400-450) distinct class II olfactory receptor proteins, preferably human class II olfactory receptor proteins, nucleic acid molecules or expression vectors encoding said olfactory receptor proteins, or recombinant host cells expressing said olfactory receptor proteins, more preferably wherein the library comprises at least one, most preferably all of the class II olfactory receptors listed as “receptor” in Table 15.
[0538] 37. A library according to any one of paragraphs 34-36, wherein the library comprises at least 25 (preferably 70-100) distinct class I olfactory receptor proteins, preferably human class I olfactory receptor proteins, nucleic acid molecules or expression vectors encoding said olfactory receptor proteins, or recombinant host cells expressing said olfactory receptor proteins, more preferably wherein the library comprises at least one, preferably all of the class I olfactory receptors listed as “receptor” in Table 22.
[0539] 38. A library according to paragraph 34 or 35, wherein the library comprises a diverse repertoire of at least 250 distinct olfactory receptor proteins, nucleic acid molecules or expression vectors encoding distinct olfactory receptor proteins, or recombinant host cells expressing distinct olfactory receptor proteins.
[0540] 39. Use of an olfactory receptor protein as described in any one of paragraphs 1 to 22, a nucleic acid molecule as described in any one of paragraphs 23-27, an expression vector as described in paragraphs 28 or 29, a recombinant host cell as described in any one of paragraphs 30-33, or a library as described in any one of paragraphs 34-38, for identifying an olfactory receptor ligand, enhancer or antagonist.
[0541] 40. Use of a library as described in any one of paragraphs 34-38, for identifying an olfactory receptor that is capable of binding a target ligand.
[0542] 41. A method for identifying an olfactory receptor ligand, said method comprising:
[0543] a) providing an olfactory receptor protein as described in any one of paragraphs 1-22 or a recombinant host cell expressing an olfactory receptor protein as described in any one of paragraphs 30-33;
[0544] b) contacting said receptor or recombinant host cell with a test compound or composition; and
[0545] c) detecting activation of the olfactory receptor.
[0546] 42. A method for identifying an olfactory receptor enhancer or antagonist, said method comprising:
[0547] a) providing an olfactory receptor protein as described in any one of paragraphs 1 to 22 or a cell expressing an olfactory receptor protein as described in any one of paragraphs 30-33;
[0548] b) contacting said receptor or recombinant host cell with a cognate ligand and a test compound or composition; and
[0549] c) detecting increased or decreased activation of the olfactory receptor as compared to controls with ligand only.
[0550] 43. A method according to paragraph 41 or 42, preferably wherein the method is for identifying an olfactory receptor ligand or enhancer, wherein the olfactory receptor is selected from the group consisting of OR7C1, OR8K3 (preferably OR8K3(L122R)), OR10J5, OR7A17, OR10H5, OR5A1, OR5A2, OR1N2 (preferably OR1N2(W23R,V230G,T287M)), OR2M2, OR2V1, OR5P3, OR6P1, OR2L2 (or OR2L2(V259L)), OR10G7 (preferably OR10G7(T5S)), OR5AN1, OR5V1, OR2L3, OR2AG2 (preferably OR2AG2(Y28C)), OR7A5, OR7E24 (or OR7E24(P242S)), OR7A10, OR10H2, OR10H1, OR10D3, OR1D2, OR2A5, OR2A25 (OR2A25(S75N,A209P)), OR11 G2 (or OR11 G2(I65N,V82I)), OR14J1, OR5M3, OR8D1, OR10G3 (preferably OR10G3(S73G)), OR10G9, OR2L5, OR8H1, OR10K1, OR11A1, OR2AK2 (preferably OR2AK2(S84N)), OR10A3, OR10A6 (preferably OR10A6(A117V,V140G,L287P)), OR10J1 (preferably OR10J1(M51I,I92M)), OR2J2, and OR2AG2 (preferably OR2AG2(Y28C)).
[0551] 44. A method according to paragraph 42, wherein the method is for identifying an olfactory receptor antagonist, and wherein the olfactory receptor is selected from the group consisting of OR52A5, OR52E8, OR56A1, OR56A3, OR56A4, OR52K1, OR51B2 (preferably OR51B2(C120R, L134F, C209S)), OR51B5, OR9Q2, OR7D4, OR2T4, OR2C1, OR2T11, OR2M2, OR2V1, OR5V1, and OR4S2, preferably selected from the group consisting of OR2M2, OR2V1, OR51B2 (preferably OR51B2(C120R,L134F,C209S)), and OR5V1, more preferably OR2M2 or OR2V1.
[0552] 45. A method according to paragraph 42, wherein the method is for identifying an olfactory receptor antagonist, wherein the olfactory receptor is OR2M2 or OR2V1, and optionally wherein step b) further comprises contacting said receptor or recombinant host cell with a copper salt.
[0553] 46. A method according to paragraph 45, wherein the cognate ligand is selected from the group consisting of 3-methyl-3-sulfanyl-hexanol, 2-mercapto-2-methyl-pentanol, and 4-methoxy-2-methylpentane-2-thiol.
[0554] 47. A method according to paragraph 42, wherein the method is for identifying an olfactory receptor antagonist, wherein the olfactory receptor is OR51B2 (preferably OR51B2(C120R,L134F,C209S)).
[0555] 48. A method according to paragraph 47, wherein the cognate ligand is 3-methyl-2-hexenoic acid.
[0556] 49. A method according to paragraph 42, wherein the method is for identifying an olfactory receptor antagonist, wherein the olfactory receptor is OR5V1
[0557] 50. A method according to paragraph 49, wherein the cognate ligand is 2,4,6-trichloroanisol.
[0558] 51. A method for identifying an olfactory receptor that is capable of binding a target ligand, said method comprising:
   [0559] a) providing a library as described in any one of paragraphs 34-38;
   [0560] b) optionally, obtaining a diverse repertoire of olfactory receptor proteins or recombinant host cells expressing olfactory receptor proteins from said library;
   [0561] c) contacting the diverse repertoire of olfactory receptor proteins or recombinant host cells expressing olfactory receptor proteins with the target ligand; and
   [0562] d) identifying an olfactory receptor that is activated by the target ligand.
[0563] 52. A method for generating an objective representation of the olfactory properties of a test compound or composition, said method comprising:
   [0564] a) providing a library as described in any one of paragraphs 34-38;
   [0565] b) optionally, obtaining a diverse repertoire of olfactory receptor proteins or cells expressing olfactory receptor proteins from said library;
   [0566] c) contacting the diverse repertoire of olfactory receptor proteins or cells expressing olfactory receptor proteins with the test compound or composition; and
   [0567] d) detecting activation of each of the olfactory receptor proteins.
[0568] 53. A method for assessing the difference or similarity between two or more test compounds or compositions, said method comprising:
   [0569] a) providing a library as described in any one of paragraphs 34-38;
   [0570] b) optionally, obtaining a diverse repertoire of olfactory receptor proteins or cells expressing olfactory receptor proteins from said library;
   [0571] c) contacting the diverse repertoire of olfactory receptor proteins or cells expressing olfactory receptor proteins with each of the two or more test compounds or compositions;
   [0572] d) detecting activation of each of the olfactory receptor proteins for each of the two or more test compounds or compositions; and
   [0573] e) comparing the activated olfactory receptor proteins between each of the two or more test compounds or compositions.

### General Information

[0574] Unless stated otherwise, all technical and scientific terms used herein have the same meaning as customarily and ordinarily understood by a person of ordinary skill in the art to which this invention belongs, and read in view of this disclosure.

### Sequence Identity

[0575] It is to be understood that each nucleic acid molecule or protein fragment or polypeptide or peptide or derived peptide or construct as identified herein by a given sequence identity number (SEQ ID NO) is not limited to this specific sequence as disclosed. Each coding sequence as identified herein encodes a given protein fragment or polypeptide or peptide or derived peptide or construct or is itself a protein fragment or polypeptide or construct or peptide or derived peptide.

[0576] Throughout this application, each time one refers to a specific nucleotide sequence SEQ ID NO (take SEQ ID NO: X as example) encoding a given protein fragment or polypeptide or peptide or derived peptide, one may replace it by:
[0577] i. a nucleotide sequence that has at least 50%, 55%, 60%, 65%, 70%, 75%, 80%, 85%, 90%, 95%, 97% or 99% sequence identity with SEQ ID NO: X;
[0578] ii. a nucleotide sequence the sequence of which differs from the sequence of a nucleic acid molecule of (i) due to the degeneracy of the genetic code; or
[0579] iii. a nucleotide sequence that encodes an amino acid sequence that has at least 50%, 55%, 60%, 65%, 70%, 75%, 80%, 85%, 90%, 95%, 97% or 99% amino acid identity or similarity with an amino acid sequence encoded by a nucleotide sequence SEQ ID NO: X.

[0580] A preferred level of sequence identity is 70%. Another preferred level of sequence identity or similarity is 75%. Another preferred level of sequence identity or similarity is 80%. Another preferred level of sequence identity or similarity is 85%. Another preferred level of sequence identity or similarity is 90%. Another preferred level of sequence identity or similarity is 95%. Another preferred level of sequence identity or similarity is 99%.

[0581] Throughout this application, each time one refers to a specific amino acid sequence SEQ ID NO (take SEQ ID NO: Y as example), one may replace it by: a polypeptide represented by an amino acid sequence comprising a sequence that has at least 50%, 55%, 60%, 65%, 70%, 75%, 80%, 85%, 90%, 95%, 97% or 99% sequence identity or similarity with amino acid sequence SEQ ID NO: Y. A preferred level of sequence identity is 70%. Another preferred level of sequence identity or similarity is 75%. Another preferred level of sequence identity or similarity is 80%. Another preferred level of sequence identity or similarity is 85%. Another preferred level of sequence identity or similarity is 90%. Another preferred level of sequence identity or similarity is 95%. Another preferred level of sequence identity or similarity is 99%.

[0582] Each nucleotide sequence or amino acid sequence described herein by virtue of its identity or similarity percentage with a given nucleotide sequence or amino acid sequence respectively has in a further preferred embodiment an identity or a similarity of at least 60%, at least 61%, at least 62%, at least 63%, at least 64%, at least 65%, at least 66%, at least 67%, at least 68%, at least 69%, at least 70%, at least 71%, at least 72%, at least 73%, at least 74%, at least 75%, at least 76%, at least 77%, at least 78%, at least 79%, at least 80%, at least 81%, at least 82%, at least 83%, at least 84%, at least 85%, at least 86%, at least 87%, at least 88%, at least 89%, at least 90%, at least 91%, at least 92%, at least 93%, at least 94%, at least 95%, at least 96%, at least 97%, at least 98%, at least 99% or 100% with the given nucleotide or amino acid sequence, respectively.

[0583] Each non-coding nucleotide sequence (i.e. of a promoter or of another regulatory region) could be replaced by a nucleotide sequence comprising a nucleotide sequence that has at least 60% sequence identity or similarity with a specific nucleotide sequence SEQ ID NO (take SEQ ID NO: A as example). A preferred nucleotide sequence has at least 60%, at least 61%, at least 62%, at least 63%, at least 64%, at least 65%, at least 66%, at least 67%, at least 68%, at least 69%, at least 70%, at least 71%, at least 72%, at least 73%, at least 74%, at least 75%, at least 76%, at least 77%, at least 78%, at least 79%, at least 80%, at least 81%, at least 82%, at least 83%, at least 84%, at least 85%, at least 86%, at least 87%, at least 88%, at least 89%, at least 90%, at least 91%, at least 92%, at least 93%, at least 94%, at least 95%, at least 96%, at least 97%, at least 98%, at least 99% or 100% identity with SEQ ID NO: A. In a preferred embodiment, such non-coding nucleotide sequence such as a promoter exhibits or exerts at least an activity of such a non-coding nucleotide sequence such as an activity of a promoter as known to a person of skill in the art.

[0584] The terms “homology”, “sequence identity” and the like are used interchangeably herein. Sequence identity is described herein as a relationship between two or more amino acid (polypeptide or protein) sequences or two or more nucleic acid (polynucleotide) sequences, as determined by comparing the sequences. In a preferred embodiment, sequence identity is calculated based on the full length of two given sequences or on a part thereof, more preferably based on the full length of two given sequences. Part thereof preferably means at least 50%, 60%, 70%, 80%, 90%, or 100% of both sequences. In the art, “identity” also refers to the degree of sequence relatedness between amino acid or nucleic acid sequences, as the case may be, as determined by the match between strings of such sequences. “Similarity” between two amino acid sequences is determined by comparing the amino acid sequence and its conserved amino acid substitutes of one polypeptide to the sequence of a second polypeptide. “Identity” and “similarity” can be readily calculated by known methods, including but not limited to those described in Bioinformatics and the Cell: Modern Computational Approaches in Genomics, Proteomics and transcriptomics, Xia X., Springer International Publishing, New York, 2018; and Bioinformatics: Sequence and Genome Analysis, Mount D., Cold Spring Harbor Laboratory Press, New York, 2004, each incorporated herein by reference.

[0585] “Sequence identity” and “sequence similarity” can be determined by alignment of two peptide or two nucleotide sequences using global or local alignment algorithms, depending on the length of the two sequences. Sequences of similar lengths are preferably aligned using a global alignment algorithm (e.g. Needleman-Wunsch) which aligns the sequences optimally over the entire length, while sequences of substantially different lengths are preferably aligned using a local alignment algorithm (e.g. Smith-Waterman). Sequences may then be referred to as “substantially identical” or “essentially similar” when they (when optimally aligned by for example the program EMBOSS needle or EMBOSS water using default parameters) share at least a certain minimal percentage of sequence identity (as described below).

[0586] A global alignment is suitably used to determine sequence identity when the two sequences have similar lengths. When sequences have a substantially different overall length, local alignments, such as those using the Smith-Waterman algorithm, are preferred. EMBOSS needle uses the Needleman-Wunsch global alignment algorithm to align two sequences over their entire length (full length), maximizing the number of matches and minimizing the number of gaps. EMBOSS water uses the Smith-Waterman local alignment algorithm. Generally, the EMBOSS needle and EMBOSS water default parameters are used, with a gap open penalty=10 (nucleotide sequences)/10 (proteins) and gap extension penalty=0.5 (nucleotide sequences)/0.5 (proteins). For nucleotide sequences the default scoring matrix used is DNAfull and for proteins the default scoring matrix is Blosum62 (Henikoff & Henikoff, 1992, PNAS 89, 915-919, incorporated herein by reference). Alternatively percentage similarity or identity may be determined by searching against public databases, using algorithms such as FASTA, BLAST, etc. Thus, the nucleic acid and protein sequences of some embodiments of the present disclosure can further be used as a “query sequence” to perform a search against public databases to, for example, identify other family members or related sequences. Such searches can be performed using the BLASTn and BLASTx programs (version 2.0) of Altschul, et al. (1990) J. Mol. Biol. 215:403-10, incorporated herein by reference. BLAST nucleotide searches can be performed with the NBLAST program, score=100, wordlength=12 to obtain nucleotide sequences homologous to nucleic acid molecules of the disclosure. BLAST protein searches can be performed with the BLASTx program, score=50, wordlength=3 to obtain amino acid sequences homologous to protein molecules of the disclosure. To obtain gapped alignments for comparison purposes, Gapped BLAST can be utilized as described in Altschul et al., (1997) Nucleic Acids Res. 25(17): 3389-3402, incorporated herein by reference. When utilizing BLAST and Gapped BLAST programs, the default parameters of the respective programs (e.g., BLASTx and BLASTn) can be used. See the homepage of the National Center for Biotechnology Information accessible on the world wide web at www.ncbi.nlm.nih.gov/.

[0587] Optionally, in determining the degree of amino acid similarity, the skilled person may also take into account so-called conservative amino acid substitutions. As used herein, “conservative” amino acid substitutions refer to the interchangeability of residues having similar side chains. Examples of classes of amino acid residues for conservative substitutions are given in the Tables below.

| | |
|---|---|
| Acidic Residues | Asp (D) and Glu (E) |
| Basic Residues | Lys (K), Arg (R), and His (H) |
| Hydrophilic Uncharged Residues | Ser (S), Thr (T), Asn (N), and |
| | Gln (Q) |
| Aliphatic Uncharged Residues | Gly (G), Ala (A), Val (V), Leu (L), |
| | and Ile (I) |
| Non-polar Uncharged Residues | Cys (C), Met (M), and Pro (P) |
| Aromatic Residues | Phe (F), Tyr (Y), and Trp (W) |

[0588] Alternative conservative amino acid residue substitution classes:

| | | | |
|---|---|---|---|
| 1 | A | S | T |
| 2 | D | E | |
| 3 | N | Q | |
| 4 | R | K | |
| 5 | I | L | M |
| 6 | F | Y | W |

[0589] Alternative physical and functional classifications of amino acid residues:

| | |
|---|---|
| Alcohol group-containing residues | S and T |
| Aliphatic residues | I, L, V, and M |
| Cycloalkenyl-associated residues | F, H, W, and Y |
| Hydrophobic residues | A, C, F, G, H, I, L, M, R, T, V, |
| | W, and Y |
| Negatively charged residues | D and E |
| Polar residues | C, D, E, H, K, N, Q, R, S, and T |
| Positively charged residues | H, K, and R |
| Small residues | A, C, D, G, N, P, S, T, and V |
| Very small residues | A, G, and S |
| Residues involved in turn formation | A, C, D, E, G, H, K, N, Q, R, S, |
| | P and T |
| Flexible residues | Q, T, K, S, G, P, D, E, and R |

[0590] For example, a group of amino acids having aliphatic side chains is glycine, alanine, valine, leucine, and isoleucine; a group of amino acids having aliphatic-hydroxyl side chains is serine and threonine; a group of amino acids having amide-containing side chains is asparagine and glutamine; a group of amino acids having aromatic side chains is phenylalanine, tyrosine, and tryptophan; a group of amino acids having basic side chains is lysine, arginine, and histidine; and a group of amino acids having sulphur-containing side chains is cysteine and methionine. Preferred conservative amino acids substitution groups are: valine-leucine-isoleucine, phenylalanine-tyrosine, lysine-arginine, alanine-valine, and asparagine-glutamine. Substitutional variants of the amino acid sequence disclosed herein are those in which at least one residue in the disclosed sequences has been removed and a different residue inserted in its place. Preferably, the amino acid change is conservative. Preferred conservative substitutions for each of the naturally occurring amino acids are as follows: Ala to Ser; Arg to Lys; Asn to Gln or His; Asp to Glu; Cys to Ser or Ala; Gln to Asn; Glu to Asp; Gly to Pro; His to Asn or Gln; Ile to Leu or Val; Leu to lie or Val; Lys to Arg; Gln or Glu; Met to Leu or lie; Phe to Met, Leu or Tyr; Ser to Thr; Thr to Ser; Trp to Tyr; Tyr to Trp or Phe; and, Val to lie or Leu. Particularly suitable amino acid substitutions in this disclosure include the substitutioLys for Arg and Arg for Lys.

### Gene or Coding Nucleotide Sequence

[0591] The term “gene” refers to a DNA fragment comprising a region (transcribed region), which is transcribed into an RNA molecule (e.g. an mRNA) in a cell, operably linked to suitable regulatory regions (e.g. a promoter). Coding nucleotide sequences may comprise sequences that are native to the cell, sequences that naturally do not occur in the cell and it may comprise combinations of both.

### Operably Linked

[0592] As used herein, the term “operably linked” refers to a linkage of polynucleotide elements in a functional relationship. A nucleic acid is “operably linked” when it is placed into a functional relationship with another nucleic acid sequence. For instance, a transcription regulatory sequence is operably linked to a coding sequence if it affects the transcription of the coding sequence. Operably linked means that the DNA sequences being linked are typically contiguous and, where necessary to join two protein encoding regions, contiguous and in reading frame. Linking can be accomplished by ligation at convenient restriction sites or at adapters or linkers inserted in lieu thereof, or by gene synthesis.

### Proteins and Amino Acids

[0593] The terms “protein” or “peptide” or “polypeptide” or “amino acid sequence” are used interchangeably and refer to molecules consisting of a chain of amino acids, without reference to a specific mode of action, size, 3-dimensional structure or origin. In amino acid sequences as described herein, amino acids or “residues” are denoted by three-letter symbols. These three-letter symbols as well as the corresponding one-letter symbols are well known to a person of skill in the art and have the following meaning: A (Ala) is alanine, C (Cys) is cysteine, D (Asp) is aspartic acid, E (Glu) is glutamic acid, F (Phe) is phenylalanine, G (Gly) is glycine, H (His) is histidine, I (Ile) is isoleucine, K (Lys) is lysine, L (Leu) is leucine, M (Met) is methionine, N (Asn) is asparagine, P (Pro) is proline, Q (Gln) is glutamine, R (Arg) is arginine, S (Ser) is serine, T (Thr) is threonine, V (Val) is valine, W (Trp) is tryptophan, Y (Tyr) is tyrosine. A residue may be any proteinogenic amino acid, but also any non-proteinogenic amino acid such as D-amino acids and modified amino acids formed by post-translational modifications, and also any non-natural amino acid. In a preferred embodiment, an amino acid in this disclosure may refer to any one of the 20 standard proteinogenic amino acids (A, C, D, E, F, G, H, I, K, L, M, N, P, Q, R, S, T, V, W, Y).

[0594] In this document and in its claims, the verb “to comprise” and its conjugations is used in its non-limiting sense to mean that items following the word are included or contained, but items not specifically mentioned are not excluded. Thus, the terms ‘comprising’, ‘comprises’, ‘comprised of’ and the like as used herein are synonymous with ‘including’, ‘includes’ or ‘containing’, ‘contains’, and are inclusive or open-ended and do not exclude additional, non-recited members, elements or method steps.

[0595] In addition, the verb “to consist” may be replaced by “to consist essentially of” meaning that subject matter as described herein may comprise additional component(s) than the ones specifically identified, said additional component(s) not altering the unique characteristic of this disclosure. In addition, the verb “to consist” may be replaced by “to consist essentially of” meaning that a method as described herein may comprise additional step(s) than the ones specifically identified, said additional step(s) not altering the unique characteristic of this disclosure.

[0596] Throughout this disclosure, the term “comprising” may be replaced with the term “consisting essentially of” or “consisting of”.

[0597] As used herein, the singular forms ‘a’, ‘an’, and ‘the’ include both singular and plural referents unless the context clearly dictates otherwise. As such, the terms “a” (or “an”), “one or more,” and “at least one” can be used interchangeably herein.

[0598] As used herein, with “at least” a particular value means that particular value or more. For example, “at least 2” is understood to be the same as “2 or more” i.e., 2, 3, 4, 5, 6, 7, 8, 9, 10, 11, 12, 13, 14, 15, . . . , etc.

[0599] Furthermore, the terms first, second, third and the like in the description and in the claims, are used for distinguishing between similar elements and not necessarily for describing a sequential or chronological order. It is to be understood that the terms so used are interchangeable under appropriate circumstances and that the embodiments described herein are capable of operation in other sequences than described or illustrated herein.

[0600] The word “about” or “approximately” when used in association with a numerical value (e.g. about 10) preferably means that the value may be the given value (of 10) more or less 1% of the value.

[0601] As used herein, the term “and/or” indicates that one or more of the stated cases may occur, alone or in combination with at least one of the stated cases, up to with all of the stated cases.

[0602] Various embodiments are described herein. Each embodiment as identified herein may be combined together unless otherwise indicated. Titles, subtitles, headings and the likes are used herein solely for ease of reading and are not intended to limit or restrict the disclosure in any way.

[0603] All patent applications, patents, and printed publications cited herein are incorporated herein by reference in the entireties, except for any definitions, subject matter disclaimers or disavowals, and except to the extent that the incorporated material is inconsistent with the express disclosure herein, in which case the language in this disclosure controls.

[0604] One skilled in the art will recognize many methods and materials similar or equivalent to those described herein, which could be used in the practice of the present invention. Indeed, the present invention is in no way limited to the methods and materials described.

[0605] The present invention is further described by the following examples which should not be construed as limiting the scope of the invention. The generalization of certain aspects and features disclosed in the below examples to the foregoing description is part of this disclosure.

### DESCRIPTION OF THE FIGURES

[0606] FIG. 1. Comparison of wild-type OR5A2 with wild-type C-terminal sequence (SEQ ID NO: 239) and chimeric OR5A2 with the optimized C-terminal sequence RNKEVKDALKRLLKRKCC (SEQ ID NO: 86). Shown is dose-dependent luciferase induction by different ligands.

[0607] FIG. 2. Examples of dose-response analysis of wild-type and chimeric OR7C1 and OR9Q2 with the optimized C-terminal sequence (SEQ ID NO: 86) used to derive detection thresholds and EC50 values as summarized in Table 1.

[0608] FIG. 3. Dose-response analysis of wild-type OR5B12 with wild-type C-terminal sequence (SEQ ID NO: 241) and chimeric OR5B12 with the optimized C-terminal sequence (SEQ ID NO: 86) compared to a variant whereby the wild-type C-terminal sequence was changed towards consensus (SEQ ID NO: 242) by changing the amino acid sequence at two positions to a leucine residue thereby rendering all conserved residues identical to the consensus sequence.

[0609] FIG. 4. Dose-response analysis of wild-type OR5A2 with wild-type C-terminal sequence (SEQ ID NO: 239) and chimeric OR5A2 with the optimized C-terminal sequence (SEQ ID NO: 86) compared to a variant whereby the wild-type C-terminal sequence was changed towards consensus (SEQ ID NO: 240) by changing the amino acid sequence at three positions thereby rendering all conserved residues identical to the consensus sequence.

[0610] FIG. 5. Dose-response analysis of wild-type OR7A17 with wild-type C-terminal sequence (SEQ ID NO: 243) and chimeric OR7A17 with the optimized C-terminal sequence (SEQ ID NO: 86) compared to a variant whereby the wild-type C-terminal sequence was changed towards consensus (SEQ ID NO: 244) by changing the amino acid sequence at five positions thereby rendering all conserved residues identical to the consensus sequence.

[0611] FIG. 6. Dose-response analysis of wild-type and chimeric 08K3 with different ligands. The weaker agonist menthone can only be identified with the more sensitive variant with the optimized C-terminus (SEQ ID NO: 86).

[0612] FIG. 7. Dose-response analysis of wild-type and chimeric 07D4 with different ligands. The weaker agonist androstenol can only be identified with the more sensitive chimeric variant with the optimized C-terminus (SEQ ID NO: 86).

[0613] FIG. 8. Screening of OR2T4 wild-type and OR2T4 with the optimized C-terminus sequence RNKEVKDALKRLLKRKCC (SEQ ID NO: 86) against 52 sulfur compounds

[0614] FIG. 9. Dose-response analysis of wild-type and chimeric OR2T4 with different ligands. No ligand was known for OR2T4 and screening of this wild-type receptor with potential ligands did not lead to de-orphanisation, while testing the chimeric variant with the optimized C-terminus (SEQ ID NO: 86) revealed this receptor to be specifically activated by specific sulfur-containing compounds such as cyclopentanethiol.

[0615] FIG. 10. Screening of OR2T11 wild-type and OR2T11 with the optimized C-terminus sequence RNKEVKDALKRLLKRKCC (SEQ ID NO: 86) against 52 sulfur compounds.

[0616] FIG. 11. Examples of dose-response analysis of wild-type and chimeric OR7C1 with C-terminal sequence (SEQ ID NO: 86) with variants of the optimized C-terminal sequences RNKEVKRAIRKLLKRKCC (SEQ ID NO: 118) and RNKEVKRAIKRLLKRKCR (SEQ ID NO: 121) combining multiple sequence variations described in Example 6 and 7.

[0617] FIG. 12. Activation of OR52E8 by odorant acids present in human sweat. The wild-type was not activated by the acids. Replacing the wild-type with the C-terminal sequence of the functional OR51E1 did not improve expression. However, using the optimized sequence from Example 1-5 (SEQ ID NO: 86) led to a strong signal upon addition of 3-methyl-3-hydroxy hexanoic acid.

[0618] FIG. 13. Activation of OR56A4 by acids of different chain length. The wild-type was activated at high concentration by decanoic acid and undecanoic acid, but not by nonanoic acid. Replacing the wild-type with the C-terminal sequence of the functional OR51E1 did reduce activity. However, using the optimized sequence form example 1-5 (SEQ ID NO: 86) led to a strong signal and much lower detection threshold upon addition of all three acids.

[0619] FIG. 14. Different chimeric variants of OR8K3: The wild-type C-terminal sequence was replaced by either the optimized sequence of Examples 1-5 (SEQ ID NO: 86) or the C-terminal sequence of two functional receptors, namely OR1N2 and OR5AN1. Chimeric receptors with C-terminal sequences from other functional receptors did not provide functional expression. Shown is dose-dependent luciferase induction by different ligands.

[0620] FIG. 15. Chimeric variant of OR5AN1: The wild-type C-terminal sequence was replaced by the C-terminal sequence of the functional receptor OR1N2. The chimeric receptors with C-terminal sequences from OR1N2 did not provide functional expression. Shown is dose-dependent luciferase induction by different ligands.

[0621] FIG. 16. Chimeric variant of OR5A2: The wild-type C-terminal sequence was replaced by the C-terminal sequence of the functional receptor OR1N2. The chimeric receptors with C-terminal sequences from OR1N2 did provide functional expression, which is around 100-fold weaker as compared to OR5A2 with the optimized C-terminus sequence RNKEVKDALKRLLKRKCC (SEQ ID NO: 86). Shown is dose-dependent luciferase induction by different ligands.

[0622] FIG. 17. Arborone (left) compared to Iso E Super (OTNE, right) for activation of OR7A17 with the optimized C-terminus RNKEVKDALKRLLKRKCC (SEQ ID NO: 86). Shown is dose-dependent luciferase induction by the mentioned ligands.

[0623] FIG. 18. Chemicals tested for odor threshold in vivo (OTH_mean, ng/L) vs. the EC50% (in μM) as determined for activation of OR7A17 with the optimized C-terminus RNKEVKDALKRLLKRKCC (SEQ ID NO: 86) in vitro.

[0624] FIG. 19. Screening of OR2M2 with the optimized C-terminus sequence RNKEVKDALKRLLKRKCC (SEQ ID NO: 86) against 52 sulfur compounds in the presence of 30 μM copper FIG. 20. Dose-response analysis of OR2M2 with the optimized C-terminus sequence RNKEVKDALKRLLKRKCC (SEQ ID NO: 86) against the key human malodorant sulfur compound 3-methyl-3-sulfanyl-hexanol and related chemicals in presence and absence of copper.

[0625] FIG. 21. Screening of the full library of class II OR variants (n=408) with 50 μM Patchoulol. Y-axis shows fold luciferase induction. OR numbering on the X-axis corresponds to the numbering in Table 15.

[0626] FIG. 22. Dose-response analysis of the library hit Patchoulol—OR14J1, comparing the improved OR sequence with the wild-type. The wild-type is inactive and the de-orphanisation of the OR was only possible with the modified sequence.

[0627] FIG. 23. Screening of the library of class I OR variants (n=77) with 500 μM 3-methyl-2-hexenoic acid. Y-axis shows fold luciferase induction. OR numbering on the X-axis corresponds to the numbering in Table 22.

[0628] FIG. 24. Screening of the full library of class II OR variants (n=408) with three different perfume oils tested at 10 ppm. Y-axis shows fold luciferase induction. On the X-axis OR are depicted which led to an at least 2-fold luciferase induction by at least one of the perfumes. Only activated OR are shown.

[0629] FIG. 25. Geranium oil spiked with different levels of Ambrofix (0.1%-10%) and tested in a dose-response analysis on OR7A17 with a C-terminal domain of SEQ ID 221 (The full DNA sequences encoding the modified receptor is SEQ ID NO: 611). Y-axis shows fold luciferase induction. On the X-axis concentration of Geranium oil in ppm is indicated.

[0630] FIG. 26. Screening of Iso E super and Ambermax on cells expressing either one or both of OR7A17 or OR7C1 with a C-terminal domain of SEQ ID 221. Y-axis shows fold luciferase induction. On the X-axis concentration in μM is indicated.

[0631] FIG. 27. Activation of OR10J5 with a C-terminal domain of SEQ ID 86 by the two structural isomer (S,E)-10-hydroxy-4,8-dimethyldec-4-enal and (R,E)-10-hydroxy-4,8-dimethyldec-4-enal. Y-axis shows % luciferase induction of the positive control (Mahonial). On the X-axis concentration of test compounds in micromolar is indicated

### EXAMPLES

### General Approach for OR Expression

[0632] To create an expression plasmid, an OR coding sequence fused at the end of TM7 to the desired C-terminus sequence was synthesized by a DNA synthesis service provider (BioCat GmbH, Germany) and inserted into pcDNA3.1(+) (Invitrogen, MA, USA) downstream of the CMV promoter sequence (SEQ ID NO: 82) using BamHI and NotI restriction sites. All the synthetic OR nucleotide sequences described below in Examples 1-15 further contained at their N-terminus a nucleotide sequence encoding a signal peptide (mmLucy-FLAG-rho, SeQ ID NOs: 80, 81) and at the C-terminus the bgh terminator sequence (SEQ ID NO: 83). All the OR expression plasmids also contain a Kozak sequence (GCCACC) between the BamHI restriction site and the start codon of the signal peptide. These plasmids thus contain a constitutively expressed OR gene.

[0633] Expression of the OR genes was in general performed in HEK293T cells which had been stably transfected with a DNA sequence coding for functional variants of the human RTP1 S (V2271, SEQ ID NO: 84) and RTP2 (L220R, SEQ ID NO: 85). These cells were seeded into polyethyleneimine coated 96-well plates (100 μl/well) at a density of 10,000 cells/well and grown at 37° C. in presence of 5% CO₂ for 24 h.

[0634] 0.625 μg of the OR expression plasmids, 1 μg of the empty pcDNA3.1(+) vector and 1 μg of pGL4.29 (Promega) harbouring the CRE-inducible luciferase were diluted in 0.25 ml OptiMEM medium (Gibco™, ThermoFisher Scientific, MA, USA). In parallel 15 μl Lipofectamine 2000 (Invitrogen) was diluted in 0.25 ml OptiMEM medium and after 5 min pre-incubation, the two mixtures were combined to prepare the transfection mixture which was incubated for further 25 min.

[0635] 50 μl of growth medium was replaced with fresh DMEM containing 9% foetal bovine serum (FBS). The pre-incubated transfection mixture was diluted to 5 ml in OptiMEM medium and 50 μl of the diluted mixture was added per well (total final volume 150 μl). Cells were further incubated for 24 h at 37° C. in presence of 5% CO2 to allow for DNA uptake and expression of the OR.

[0636] Functional expression and response to ligands was tested by removal of 100 μl growth medium and addition of 50 μl of DMEM containing 9% FBS and containing ligands and a maximal amount of 1% DMSO. Cells were stimulated for 4.5 h and then the luciferase signal, which is induced based on OR-dependent cAMP production, was measured.

### Example 1: Improved Functional Expression of Modified OR5A2 Using the Optimized C-Terminal Sequence RNKEVKDALKRLLKRKCC (SEQ ID NO: 86)

[0637] The wild-type OR5A2 and the OR5A2 gene modified with the optimized C-terminal sequence RNKEVKDALKRLLKRKCC (SEQ ID NO: 86) were transfected into HEK293T cells which had a stably integrated DNA sequence coding for functional variants of the human RTP1 S (V2271, SEQ ID NO: 84) and RTP2 (L220R, SEQ ID NO: 85).

[0638] No activation of the wild-type receptor by the polycyclic musk Galaxolide nor by the macrocyclic musk Muscone was detected (FIG. 1, left panel). The modified receptor, however, was activated by both musk compounds. As shown in FIG. 1 (right panel), activation occurs at low concentration (<0.01 μM for galaxolide and at 1 μM for muscone) and it is specific to musk compounds with no response recorded for ethyl vanillin.

[0639] Thus, only by using the modified variant of OR5A2 with the modified C-terminal sequence but not with the wild-type C-terminal sequence, potentially musky-smelling compounds can efficiently be screened against OR5A2 expressed in a cell line along with RTP1 S and RTP2 and a Lucy-FLAG-rho-Tag.

### Example 2: Improved Sensitivity of a Wide Range of Modified OR Using the Optimized C-Terminal Sequence RNKEVKDALKRLLKRKCC (SEQ ID NO: 86)

[0640] Modified versions of different OR genes were generated by exchanging the C-terminal sequence after TM7 by the optimized sequence RNKEVKDALKRLLKRKCC (SEQ ID NO: 86) as shown in example 1 for OR5A2. Cells were transfected either with the wild-type OR gene or with the respective modified version. Transfected cells were stimulated with a cognate ligand of these receptors in a dose response analysis and from the dose-response curve the lowest concentration, at which the ligand triggers a 2-fold induction of the luciferase signal over the background was determined as a measure of the lower detection threshold. In parallel the EC50, i.e. the concentration to reach 50% of the maximal activation (potency) was calculated. Finally, the maximal fold-induction of luciferase over the solvent control (efficacy) was determined and compared between wild-type and modified version.

[0641] As can be observed in Table 1 and in the examples shown in FIG. 2, for all tested receptors, using the optimized sequence SEQ ID NO: 86, the detection threshold (concentration for 2-fold induction in μM) was clearly reduced, and for many receptors this increase in sensitivity was 10 to more than 100-fold. This increased sensitivity was also observed by comparing the EC50 values, however, EC50 values are also influenced by the maximal induction observed (efficacy), which for several receptors is lower for the wild-type than for the modified version. Thus, for OR52E8, OR2T4 and OR5A2, no induction was observed for the wild-type, while functional expression was achieved with the modified version (all-or-nothing effect). Other receptors (e.g. OR8K3, OR5B112, OR7C1, OR7D4) have (next to much higher detection threshold for the wild-type) also much lower efficacy for the wild-type as compared to the modified version.

TABLE 1
Improved functional expression of modified OR-genes containing the truncated, optimized C-terminus
RNKEVKDALKRLLKRKCC (SEQ ID NO: 86)

| Receptor | | | | | | | | | | |
|---|---|---|---|---|---|---|---|---|---|---|
| | NCBI Gene ID / | | | Detection threshold; | | | | | | |
| | GenBank | | | concentration for 2- | | | | | | |
| | accession number | | | fold induction (μM) | | | Potency (μM) | | | |
| | (sequence source | SEQ | | | | Fold- | | | Fold- | |
| | wild-type with | ID NO | | | | improve- | | EC50 | improve- | |
| | nucleotide position | modified | | | changed | ment | EC50 | changed | ment | Comments on |
| Gene | ORF) | sequence | Ligand | wild-type | C-term. | threshold | wild-type | C-term | potency | efficacy |
| OR7C1 | 26664 / | 168 | Ambermax | 2.76 | 0.17 | 16.2 | 6.14 | 2.3 | 2.7 | 3.5-fold lower |
| | NM_001370485.4 | | | | | | | | | maximal |
| | (735-1697) | | | | | | | | | induction for |
| | | | | | | | | | | wild-type |
| OR9Q2 | 219957 / | 169 | Para-Cresol | 6.6 | 0.12 | 53 | 30.7 | 2.8 | 11 | |
| | KP290525.1 (1-945) | | | | | | | | | |
| OR8K3 | 219473 / | 170 | Menthol | 160 | 11 | 14.4 | 236 | 115 | 2 | 3-fold lower |
| | KP290269.1 (1-939) | | | | | | | | | maximal |
| | | | | | | | | | | induction for |
| | | | | | | | | | | wild-type |
| OR10J5 | 127285 / | 171 | Mahonial | 7.42 | 0.65 | 11.5 | 46 | 20 | 2.3 | |
| | NM_001004469.1 | | | | | | | | | |
| | (1-930) | | | | | | | | | |
| OR10J5 | 127285 / | 171 | Nympheal | n.i. (>31 | 5.64 | >>6 | n.i. (>31 | 6.2 | >>6 | Only 1.8-fold |
| | NM_001004469.1 | | | μM, at | | | μM, at | | | induction for |
| | (1-930) | | | cytotoxic | | | cytotoxic | | | WT, but 5.5- |
| | | | | dose) | | | dose) | | | fold for |
| | | | | | | | | | | changed C- |
| | | | | | | | | | | terminus |
| OR1C1 | 26188 / | 172 | Linalool | 34.7 | 16.2 | 2.1 | 379 | 202 | 1.9 | |
| | KP290137.1 (1- | | | | | | | | | |
| | 945) | | | | | | | | | |
| OR7D4 | 125958 / | 173 | Androstenone | 3.6 | 0.014 | 265 | 8.44 | 0.13 | 66 | 3-fold lower |
| | NM_001005191.3 | | | | | | | | | maximal |
| | (404-1342) | | | | | | | | | induction for |
| | | | | | | | | | | wild-type |
| OR2T4 | 127047 / | 174 | Cyclo- | n.i. | 3.89 | >>100 | n.i. | 14.6 | >>22 | No induction |
| | NM_001004696.2 | | pentanethiol | (>>316) | | | (>>316) | | | wild-type |
| | (19-963) | | | | | | | | | |
| OR5B12 | 390191 / | 175 | Hedione | n.i. | 29 | >9 | n.i. | 58.3 | >5 | Induction wild- |
| | NM_001004733.3 | | | (>>250) | | | (>>250) | | | type only 1.75- |
| | (211-1155) | | | | | | | | | fold |
| OR5B12 | 390191 / | 175 | Hedione HC | 96 | 8.8 | 11 | 69 | 18.3 | 3.8 | 4-fold lower |
| | NM_001004733.3 | | | | | | | | | maximal |
| | (211-1155) | | | | | | | | | induction for |
| | | | | | | | | | | wild-type |
| OR7A17 | 26333 / | 176 | Ambrofix | 1.9 | 0.1 | 18.4 | 5.6 | 1.3 | 4.2 | 2-fold lower |
| | NM_030901.2 (487- | | | | | | | | | maximal |
| | 1416) | | | | | | | | | induction for |
| | | | | | | | | | | wild-type |
| OR10H5 | 284433 / | 177 | Calone | 60.1 | 24.3 | 2.5 | 41 | 60 | 0.7 * | 3-fold lower |
| | NM_001004466.2 | | | | | | | | | maximal |
| | (68-1015) | | | | | | | | | induction for |
| | | | | | | | | | | wild-type |
| OR52A5 | 390054 / | 178 | 4- | >1000 | 101 | >10 | n.a. | 300 | n.a. | 2.5-fold lower |
| | NM_001005160.3 | | ethyloctanoic | | | | | | | maximal |
| | (107-1057) | | acid | | | | | | | induction for |
| | | | | | | | | | | wild-type |
| OR5A2 | 219981 / | 179 | Galaxolide | n.i. | 0.0016 | >20000 | n.i. | 0.1 | >300 | No induction |
| | NM_001001954.2 | | | (>>31) | | | (>>31) | | | wild-type |
| | (335-1309) | | | | | | | | | |
| OR5A1 | 219982 / | 199 | Beta-ionone | 19.1 | 3.2 | 5.9 | 5.5 | 3.1 | 1.8 | 4-fold lower |
| | NM_001004728.2 | | | | | | | | | maximal |
| | (401-1348) | | | | | | | | | induction for |
| | | | | | | | | | | wild-type |
| OR1N2 | 138882 / | 180 | Ambrettolide | 1.33 | 0.26 | 5.2 | 2.1 | 1.5 | 1.5 | 1.5 |
| | KP290194.1 (43- | | | | | | | | | |
| | 993) | | | | | | | | | |
| OR52E8 | 390079 / | 181 | 3-Methyl-3- | n.i. | 59 | >>5 | n.i. | 69 | >>5 | No induction |
| | NM_001005168.3 | | Hydroxy- | (>>316) | | | (>>316) | | | wild-type |
| | (1-942) | | Hexanoic acid | | | | | | | |
| OR56A4 | 120793 / | 182 | Undecanoic | 43 | 3.2 | 13.5 | 114 | 22 | 5.1 | |
| | NM_001005179.4 | | acid | | | | | | | |
| | (221-1162) | | | | | | | | | |
| OR2C1 | 4993 / | 183 | Ethyl 3- | 15.4 | 0.19 | 82.7 | 27.9 | 4.4 | 6.4 | 5-fold lower |
| | NM_012368.3 (53- | | mercapto- | | | | | | | maximal |
| | 991) | | propionate | | | | | | | induction for |
| | | | | | | | | | | wild-type |
| OR2T11 | 127077 / | 184 | Diallyl | >200 | 2.03 | >100 | n.i. | 6.51 | >>40 | No induction |
| | KP290143.1 (1-951) | | disulfide | | | | (>>200) | | | wild-type |
| OR4S2 | 219431 / | 185 | Benzo- | 29.4 | 12.5 | 2.4 | 136.8 | 104 | 1.3 | 2-fold lower |
| | KP290251.1 (1-936) | | thiazole | | | | | | | maximal |
| | | | | | | | | | | induction for |
| | | | | | | | | | | wild-type |

n.i. no luciferase induction above background at maximal test concentration
n.a. not applicable, not sufficient induction to calculate EC50
* Higher EC50 due to much higher efficacy of optimized C-terminus

### Example 3: Improved Functional Expression of Modified or Using the Optimized C-Terminal Sequence RNKEVKDALKRLLKRKCC (SEQ ID NO: 86) as Compared to OR Genes Optimized by Changing C-Terminus Towards Consensus

[0642] One option investigated before (Kotthoff et al. 2021, see supra) to optimize expression was based on the parent C-terminal sequence of a receptor which was changed towards the consensus sequence by restoring the consensus at single, non-conserved aminoacids, but leaving all the residues in the C-terminal sequence unchanged, for which there is no clear consensus residue from multiple sequence alignment. Thereby, for each receptor a specific C-terminal sequence was derived from the particular parent sequence of that receptor. This approach was compared to the approach with the same optimized, modified C-terminus added as described in Example 1 and 2 added to each receptor. Thus, the C-terminal sequence of OR5B112 was changed by introducing two leucine residues at positions where this amino acid is most common in the consensus sequence. At all other positions, OR5B12 already contains the typical residues of the consensus sequence (Kotthoff et al. 2021, see supra). As shown in FIG. 3, changing the sequence of OR5B112 towards consensus had no significant effect whereas the optimized sequence described above led to strong functional expression as compared to the wild-type. Thus, restoring the consensus at conserved amino acids in the parent sequence as done by (Kotthoff et al. 2021, see supra) is not a generally applicable method for improved functional expression, whereas the generation of a modified receptor with the optimized C-terminal sequence as described herein is.

[0643] Similarly, for OR5A2 changing the native C-terminus towards consensus by exchanging three amino acids had no effect and, similar to the wild-type, no functional expression was achieved by this approach, whereas adding the optimized C-terminus led to functional expression (FIG. 4).

[0644] In the case of OR7A17, which already as wild-type has a relatively low detection threshold for two-fold induction of 1.9 μM for Ambrofix, altering the sequence towards consensus by exchanging 5 amino acids indeed had a positive effect, lowering the detection threshold 3-fold to 0.6 μM, however a much better effect was achieved using the optimized C-terminal sequence, as the detection threshold could be lowered 18-fold (Table 1 and FIG. 5). Thus, optimal improvement of activity is not achieved by the approach of just using the parent C-terminus and mutating it towards consensus, but rather by exchanging the C-terminal sequence with the optimized sequence described herein.

### Example 4: More Comprehensive Ligand Spectrum and the Discovery of Novel Ligand-OR Pairs by Using Optimized C-Terminus RNKEVKDALKRLLKRKCC (SEQ ID NO: 86)

[0645] The ligand spectrum of the modified OR with the optimized C-terminus sequence RNKEVKDALKRLLKRKCC (SEQ ID NO: 86) were further tested with multiple ligands and compared to the OR with the wild-type sequence.

[0646] As shown in FIG. 6, the wild-type receptor OR8K3 showed only a weak response to menthol (both natural menthol and (S)-menthol (“Menthol Laevo”)), while the related molecule menthone is inactive up to 316 μM. Using the modified receptor variant, a stronger activation by menthol is observed, while in parallel menthone is also activating the receptor, although with a lower potency. Thus, using the improved sensitivity of the assay provided by the modified variant, activation of OR8K3 by a broader set of mint-smelling molecules can be detected.

[0647] Similarly, in FIG. 7 the dose-response of OR7D4 is shown when tested both with androstenone and the closely related molecule androstenol. A significant activation by androstenone is shown for both variants, while androstenol can only activate the modified version of the receptor: Androstenol is a significantly weaker agonist, but it would appear as lacking activation of OR7D4 if only tested on the poorly expressed wild-type variant. Thus, a better understanding of the receptive space of OR7D4 is possible based on the improved sensitivity of the assay provided by the modified variant.

### Example 5: Identifying OR-Ligand Pairs Using the Optimized C-Terminus Sequence RNKEVKDALKRLLKRKCC (SEQ ID NO: 86)

[0648] Little is known about the binding of key sulfur odorants to human ORs. Thus, a library of sulfur odorants was screened vs. a selection of potential sulfur compound receptors. As shown in FIG. 8, no clear OR-ligand pairs were identified for OR2T4 with the wild-type sequence, whereas with the more sensitive modified variant with the optimized C-terminus diallyl disulfide, dipropyl disulfide, 2-methyl-3-tetrahydrofuranthiol and cyclopentanethiol were identified as good ligands for this receptor. This difference in screening efficacy was also verified by a dose-response analysis using the wild-type and the receptor variant (FIG. 9). Similarly, for OR2T11, none of the 52 sulfur compounds was active when tested on the wild-type, whereas the more sensitive modified variant with the optimized C-terminus identified 8 ligands with >4-fold induction for this receptor (FIG. 10). Thus, receptor deorphanisation is facilitated with the optimized C-terminus sequence.

### Example 6: Flexibility of the Optimized C-Terminal Sequence: Base Substitutions in the C-Terminal Sequence Motif

[0649] As shown in Examples 1-5, the optimized C-terminal sequence RNKEVKDALKRLLKRKCC (SEQ ID NO: 86) allows for improved heterologous OR-activation experiments for a large variety of ORs, allowing to deorphanize ORs, finding novel ligands for de-orphanized ORs, testing at lower ligand concentrations with fewer solubility issues and less cytotoxicity and obtaining higher efficacy for a better signal-to-noise ratio.

[0650] To test for possible variants of the sequence RNKEVKDALKRLLKRKCC (SEQ ID NO: 86) leading to similar improved functional expression, different point mutations were introduced into the first 16 amino acids of this sequence (corresponding to RNKEVKDALKRLLKRK, SEQ ID NO: 10) and the variants were fused after the TM7 with OR7C1. As shown in FIG. 2, OR7C1 with the C-terminal sequence RNKEVKDALKRLLKRKCC (SEQ ID NO: 86) gives around 10-fold luciferase induction at 1 μM of Ambermax and 20-fold induction at 3.1 μM of Ambermax. Activation of the different modified variants were then compared to the variant with the optimized sequence described above at these two concentrations. Thus, all variants were transfected in HEK293T cells which had been stably transfected with a DNA sequence coding for functional variants of the human RTP1 S (V2271, SEQ ID NO: 84) and RTP2 (L220R, SEQ ID NO: 85). Cells were then stimulated with 1 μM and 3.1 μM of Ambermax and the fold-induction of luciferase was compared to the fold-induction in the equal experiment conducted on the standard sequence RNKEVKDALKRLLKRKCC (SEQ ID NO: 86), which was set to 100%, and with the wild-type. The test concentrations were selected to fall into the range of partial activity of the wild-type sequence.

[0651] Sequence modifications that gave >66% of the activation at 1 μM of Ambermax of the sequence RNKEVKDALKRLLKRKCC (SEQ ID NO: 86) were considered active variants, which can be preferentially employed for optimized expression. Sequence modifications that gave 33-66% of the activation at 1 μM of Ambermax of the reference sequence were considered partly active variants, which can optionally be employed for optimized expression. As shown in Table 2, while the optimized sequence employed in examples 1-5 is one possible option, other variants with single amino acid substitutions are similarly active and in some cases even provide improved activity.

TABLE 2
Activation by Ambermax of OR7C1 variants with the optimized C-terminus
containing single base substitutions in the first 16 amino acids of the
C-terminal motif RNKEVKDALKRLLKRKCC (SEQ ID NO: 86).

| | % of the activation by the | |
|---|---|---|
| | optimized sequence | |
| | RNKEVKDALKRLLKRKCC | |
| C-terminal Sequence | 1 μM Ambermax | 3.1 μM Ambermax |
| Wild Type | 0.5 | 4.4 |
| RNKEVKDALKRLLKRKCC (SEQ ID NO: 86) | 100 | 100 |

Active variants

| | | |
|---|---|---|
| RNREVKDALKRLLKRKCC (K295R) (SEQ ID | 119.1 | 128.7 |
| NO: 87) | | |
| RNKEIKDALKRLLKRKCC (V2971) (SEQ ID | 66.5 | 98.9 |
| NO: 88) | | |
| RNKEMKDALKRLLKRKCC (V297M) (SEQ ID | 76.7 | 67.0 |
| NO: 89) | | |
| RNKEVRDALKRLLKRKCC (K298R) (SEQ ID | 117.4 | 153.9 |
| NO: 90) | | |
| RNKEVKKALKRLLKRKCC (D299K) (SEQ ID | 140.8 | 98.2 |
| NO: 91) | | |
| RNKEVKEALKRLLKRKCC (D299E) (SEQ ID | 81.3 | 113.6 |
| NO: 92) | | |
| RNKEVKNALKRLLKRKCC (D299N) (SEQ ID | 95.3 | 113.5 |
| NO: 93) | | |
| RNKEVKRALKRLLKRKCC (D299R) (SEQ ID | 176.6 | 176.9 |
| NO: 94) | | |
| RNKEVKVALKRLLKRKCC (D299V) (SEQ ID | 122.1 | 108.8 |
| NO: 95) | | |
| RNKEVKAALKRLLKRKCC (D299A) (SEQ ID | 115.3 | 111.0 |
| NO: 96) | | |
| RNKEVKQALKRLLKRKCC (D299Q) (SEQ ID | 128.4 | 116.7 |
| NO: 97) | | |
| RNKEVKDAVKRLLKRKCC (L301V) (SEQ ID | 120.1 | 104.6 |
| NO: 98) | | |
| RNKEVKDAIKRLLKRKCC (L301I) (SEQ ID | 174.6 | 161.1 |
| NO: 99) | | |
| RNKEVKDALRRLLKRKCC (K302R) (SEQ ID | 86.0 | 88.1 |
| NO: 100) | | |
| RNKEVKDALKKLLKRKCC (R303K) (SEQ ID | 86.8 | 67.6 |
| NO: 101) | | |
| RNKEVKDALKRLIKRKCC (L3051) (SEQ ID | 88.6 | 80.8 |
| NO: 102) | | |
| RNKEVKDALKRLFKRKCC (L305F) (SEQ ID | 207.1 | 127.1 |
| NO: 103) | | |
| RNKEVKDALKRLLRRKCC (K306R) (SEQ ID | 96.3 | 92.8 |
| NO: 104) | | |
| RNKEVKDALKRLLKKKCC (R307K) (SEQ ID | 106.7 | 88.0 |
| NO: 105) | | |
| RNKEVKDALKRLLKRRCC (K308R) (SEQ ID | 104.1 | 93.1 |
| NO: 106) | | |

Partly active variants

| | | |
|---|---|---|
| RNKDVKDALKRLLKRKCC (E296D) (SEQ ID | 53.2 | 47.4 |
| NO: 107) | | |
| RNKQVKDALKRLLKRKCC (E296Q) (SEQ ID | 42.0 | 56.4 |
| NO: 108) | | |
| RNKELKDALKRLLKRKCC (V297L) (SEQ ID | 43.8 | 81.8 |
| NO: 109) | | |
| RNKEVKGALKRLLKRKCC (D299G) (SEQ ID | 41.6 | 59.8 |
| NO: 110) | | |
| RNKEVKDALHRLLKRKCC (K302H) (SEQ ID | 44.4 | 58.8 |
| NO: 111) | | |
| RNKEVKDALKRILKRKCC (L304I) (SEQ ID | 53.2 | 61.5 |
| NO: 112) | | |
| RNKEVKDALKRLLGRKCC (K306G) (SEQ ID | 63.2 | 96.4 |
| NO: 113) | | |

Examples of inactive variants

| | | |
|---|---|---|
| KNKEVKDALKRLLKRKCC (R293K) (SEQ ID | 26.0 | 64.9 |
| NO: 186) | | |
| RTKEVKDALKRLLKRKCC (N294T) (SEQ ID | 3.3 | 6.6 |
| NO: 187) | | |
| RQKEVKDALKRLLKRKCC (N294Q) (SEQ ID | 28.5 | 59.1 |
| NO: 188) | | |
| RNHEVKDALKRLLKRKCC (K295Q) (SEQ ID | 16.2 | 33.3 |
| NO: 189) | | |
| RNKEVKDGLKRLLKRKCC (A300G) (SEQ ID | 4.6 | 11.2 |
| NO: 190) | | |
| RNKEVKDVLKRLLKRKCC (A300V) (SEQ ID | 3.9 | 3.9 |
| NO: 191) | | |
| RNKEVKDAMKRLLKRKCC (L301M) (SEQ ID | 27.0 | 50.2 |
| NO: 192) | | |
| RNKEVKDALKHLLKRKCC (R303H) (SEQ ID | 12.3 | 24.1 |
| NO: 193) | | |
| RNKEVKDALKRVVKRKCC (L304V; L305V) | 30.4 | 18.7 |
| (SEQ ID NO: 194) | | |
| RNKEVKDALKRLRKRKCC (L305R) (SEQ ID | 14.1 | 26.3 |
| NO: 195) | | |
| RNKEVKDALKRLKKRKCC (L305K) (SEQ ID | 5.7 | 12.4 |
| NO: 196) | | |
| RNKEVKDALKRLLERKCC (K306E) (SEQ ID | 5.6 | 18.8 |
| NO: 197) | | |

### Example 7: Flexibility of the C-Terminal Sequence—Base Substitutions in the Amino Acids at Position 17 and 18 of the C-Terminal Sequence Motif

[0652] To further test for possible variants of the sequence RNKEVKDALKRLLKRKCC (SEQ ID NO: 86) leading to similar benefits, 120 different point mutations were introduced into the optional last 2 amino acids of this sequence (positions 17 and 18) and all variants were fused after the TM7 of OR7C1. Activation of the different modified variants was then compared to the variant with the optimized sequence described above in Examples 1-5.

[0653] Thus, all variants were transfected into HEK293T cells, which had been stably transfected with a DNA sequence coding for functional variants of the human RTP1 S (V227I, SEQ ID NO: 84) and RTP2 (L220R, SEQ ID NO: 85). Cells were then stimulated with 1 μM and 3.1 μM of Ambermax and the fold-induction of luciferase was compared to fold-induction in the equal experiment conducted on the standard sequence RNKEVKDALKRLLKRKCC (SEQ ID NO: 86), which was set to 100%, and with the wild-type.

[0654] As shown in Table 3, there is flexibility in the last two amino acids, with a number of variants being active, but there can be also complete inactivation with the inappropriate amino acids in these positions.

TABLE 3
Activation by Ambermax of variants of the optimized
C-terminus fused to OR7C1: Effect of base substitutions
at amino acid positions 17 and 18 of the C-terminal
motif RNKEVKDALKRLLKRKCC (SEQ ID NO: 86)

| | | % of the activation by the optimized | |
|---|---|---|---|
| C-terminal 2 amino acids | | sequence RNKEVKDALKRLLKRKCC | |
| (3 letter and single letter code) | | 1 μM Ambermax | 3.1 μM Ambermax |
| Wild Type | | 0.0 | 3.7 |
| Cys Cys | CC | 100 | 100 |

Examples of active variants

| | | | |
|---|---|---|---|
| Ser Ile | SI | 225.3 | 110.4 |
| Tyr Pro | YP | 221.7 | 148.6 |
| Pro Gln | PQ | 211.8 | 130.8 |
| Phe Arg | FR | 181.7 | 128.1 |
| Cys Arg | CR | 173.2 | 179.6 |
| Arg Arg | RF | 167.7 | 77.0 |
| Glu Lys | EK | 153.0 | 81.0 |
| Pro Arg | PR | 142.3 | 97.0 |
| Cys Gly | CG | 142.3 | 126.5 |
| Phe Lys | FK | 141.9 | 141.2 |
| Arg Gly | RG | 139.9 | 128.8 |
| Arg Cys | RC | 134.0 | 184.1 |
| Arg Thr | RT | 133.7 | 79.8 |
| Arg Phe | RF | 130.8 | 146.6 |
| Gly Gly | GG | 128.9 | 103.4 |
| Tyr Arg | YR | 127.8 | 110.4 |
| Arg Stop | R | 127.2 | 116.1 |
| Gly Cys | GC | 126.8 | 112.1 |
| Thr Gly | TG | 122.0 | 59.2 |
| Pro Cys | PC | 120.8 | 156.6 |
| His Pro | HP | 114.6 | 105.9 |
| Pro Stop | P | 113.7 | 83.3 |
| Leu Stop | L | 113.6 | 121.4 |
| Pro Gly | PG | 111.9 | 103.5 |
| Lys Tyr | KY | 110.2 | 63.2 |
| Cys Pro | CP | 109.6 | 130.8 |
| Tyr Tyr | YY | 108.3 | 97.3 |
| Phe Phe | FF | 103.8 | 85.3 |
| Lys Stop | K | 103.4 | 105.7 |
| Gly Stop | G | 101.5 | 109.5 |
| Cys Phe | CF | 100.5 | 165.2 |
| Asn Pro | NP | 100.0 | 91.8 |
| Tyr Stop | Y | 95.8 | 92.5 |
| Tyr Leu | YL | 95.4 | 81.4 |
| Phe stop | F | 93.7 | 86.1 |
| Ile Cys | IC | 92.6 | 94.4 |
| His Cys | HC | 91.9 | 90.9 |
| Gly Leu | CL | 91.4 | 118.1 |
| Tyr Cys | YC | 91.3 | 136.8 |
| Glu Arg | ER | 85.0 | 101.5 |
| Met Stop | M | 84.7 | 99.7 |
| Trp stop | W | 84.6 | 68.0 |
| Arg Pro | RP | 83.9 | 77.6 |
| Pro Ala | PA | 75.6 | 95.3 |
| Phe Cys | FC | 72.9 | 110.5 |
| Arg Tyr | RY | 72.0 | 77.1 |

Examples of inactive variants

| | | | |
|---|---|---|---|
| Pro Pro | PP | 36.2 | 49.5 |
| Val Ser | VS | 4.3 | 3.6 |
| Lys Ala | KA | 3.5 | 0.7 |
| Ala Ala | AA | 2.1 | 0.5 |
| Ala Glu | AE | 2.1 | 1.1 |
| Arg Lys | RK | 2.0 | 0.7 |
| His Asp | HN | 1.6 | 1.6 |
| Thr Asp | TN | 1.5 | 0.2 |
| Val Met | VM | 1.3 | 1.3 |
| Ser Gln | SQ | 1.0 | 0.6 |
| Ser Ser | SS | 0.9 | 4.3 |
| Gln Glu | QE | 0.0 | 0.0 |
| Ile Ala | IA | 0.0 | 0.0 |
| Ile Ser | IS | 0.0 | 0.0 |
| Leu Gln | LQ | 0.0 | 0.0 |
| Ser Ala | SA | 0.0 | 0.1 |
| Thr Ala | TA | 0.0 | 0.0 |

### Example 8: Flexibility of the C-Terminal Sequence—Truncations of Amino Acids at Position 17 and 18 of the C-Terminal Sequence Motif

[0655] To further test for possible variants of the sequence RNKEVKDALKRLLKRKCC (SEQ ID NO: 86) leading to similar benefits in functional expression, further truncations by one or two amino acids were introduced and the sequence was fused after the TM7 with either OR7C1, OR2T4 or OR51B12. Activation of the different modified variants were then compared to the variant with the optimized sequence described above. For optima activity, 30 μM of copper was added to the assay with OR2T4 (added as CuCl₂).

[0656] As shown in Table 4, the sequence motif with the first 16 amino acids of RNKEVKDALKRLLKRKCC (RNKEVKDALKRLLKRK, SEQ I0 NO: 10) is sufficient for high functional expression of OR7C1, indicating that the additional amino acids in positions 17 and 18 are optional and do not need to be introduced for functional expression of all ORs. However, omitting these two additional amino acids ideas to reduced activity in the case of OR2T4 and compete ios of activity in OR5B112, indicating that it is beneficia to add additional amino acids at position 17 and 18 in case these ORs are employed or if a library of many or all OR is generated as the optional amino acids allow for a more broadly improved expression of different ORs.

TABLE 4
Activation of variants of the modified OR7C1, OR2T4 and OR5B12 with optimized
C-terminus: Effect of truncation of the optional amino acids at positions 17
and 18 of the C-terminal motif RNKEVKDALKRLLKRKCC (SEQ ID NO: 86)

| | % of the activation by the optimized sequence | |
|---|---|---|
| OR/C-terminal Sequence | RNKEVKDALKRLLKRKCC | |
| | 1 μM Ambermax | 3.1 μM Ambermax |
| OR7C1 | 0 | 3.7 |
| Wild Type | | |
| OR7C1 | 100 | 100 |
| RNKEVKDALKRLLKRKCC (SEQ | | |
| ID NO: 86) | | |
| OR7C1 | 137.7 | 124.2 |
| RNKEVKDALKRLLKRKC (SEQ ID | | |
| NO: 198) | | |
| OR7C1 | 89.5 | 89.2 |
| RNKEVKDALKRLLKRK (SEQ ID | | |
| NO: 10) | | |
| | 10 μM Cyclopentanethiol | 31 μM Cyclopentanethiol |
| OR2T4 | 0 | 0 |
| Wild Type | | |
| OR2T4 | 100 | 100 |
| RNKEVKDALKRLLKRKCC (SEQ | | |
| ID NO: 86) | | |
| OR2T4 | 37.7 | 63.5 |
| RNKEVKDALKRLLKRKC (SEQ ID | | |
| NO: 198) | | |
| OR2T4 | 25.3 | 25.2 |
| RNKEVKDALKRLLKRK (SEQ ID | | |
| NO: 10) | | |
| | 31 μM Hedione HC | 62.5 μM Hedione HC |
| OR5B12 | 18.3 | 8 |
| Wild Type | | |
| OR5B12 | 100 | 100 |
| RNKEVKDALKRLLKRKCC (SEQ | | |
| ID NO: 86) | | |
| OR5B12 | 0 | 0 |
| RNKEVKDALKRLLKRKC (SEQ ID | | |
| NO: 198) | | |
| OR5B12 | 0 | 0 |
| RNKEVKDALKRLLKRK (SEQ ID | | |
| NO: 10) | | |

### Example 9: Flexibility of the C-Terminal Sequence—Addition of Additional Amino Acids at Positions 19-22

[0657] As shown in Example 1-5 and in Example 6, two cysteine residues in position 17 and 18 of the optimized C-terminal sequence RNKEVKDALKRLLKRKCC (SEQ ID NO: 86) provide improved functional expression of a wide variety of receptors. As shown in Example 8, these amino acids are optional and not needed for improved expression of all ORs. As shown in Example 7, there is flexibility in these two last amino acids, and particularly replacing one of the Cys-residues with a basic amino acid keeps or even improves activity, whereby particularly adding an arginine as the second residue improved activity for OR7C1. This effect is further exploited with variants elongated with further basic amino acids. For ease of reference, positions corresponding to elongated variants are denoted using the positioning of SEQ ID NO: 86 (which has 18 amino acids) as reference, thus positions 19-22 of SEQ ID NO: 86 as used herein correspond to positions present in the elongated variants. In other words, reference to e.g., position 19 of SEQ ID NO: 86 in a variant means that this variant has been elongated by 1 amino acid etc.

[0658] Thus having 1-6 basic amino acids in amino acid positions 17-22 improved activity for 0701, as shown in Table 5. Similarly, having 2-3 basic amino acid residues at positions 18-20 improved activity of OR51B12 compared to only two C in position 17 and 18 (Table 6). For OR2T4 having 2-3 basic amino acid residues in positions 18-20 did not further increase activity, but it was not detrimental for the activity either (Table 7), indicating that in a library with the same C-terminus added to every OR, these additions are preferred, as they only improve or maintain the activity, but do not compromise the activity for the receptors tested. Furthermore, different amino acids added at position 19 improved activity of OR51B12 (Table 6), which is particularly dependent on the additional amino acids beyond position 16 (See Example 8). The method used and the way of calculating the results is the same as in Examples 6-8.

TABLE 5
Activation by Ambermax of OR7C1 variants with the optimized C-terminus
containing additional basic residues at amino acid positions 18-22.

| | % of the activation by the optimized | |
|---|---|---|
| | sequence RNKEVKDALKRLLKRKCC | |
| C-terminal Sequence | 1 μM Ambermax | 3.1 μM Ambermax |
| Wild Type | 0.5 | 4.4 |
| RNKEVKDALKRLLKRKCC | 100 | 100 |
| (SEQ ID NO: 86) | | |
| RNKEVKDALKRLLKRKCRR | 188.9 | 161.9 |
| (SEQ ID NO: 133) | | |
| RNKEVKDALKRLLKRKCRRR | 265.3 | 192.2 |
| (SEQ ID NO: 149) | | |
| RNKEVKDALKRLLKRKCRKK | 196.0 | 159.5 |
| (SEQ ID NO: 150) | | |
| RNKEVKDALKRLLKRKCRRRR | 263.5 | 183.6 |
| (SEQ ID NO: 154) | | |
| RNKEVKDALKRLLKRKCRRRRR | 204.3 | 160.7 |
| (SEQ ID NO: 157) | | |
| RNKEVKDALKRLLKRKCRRRKK | 168.8 | 122.5 |
| (SEQ ID NO: 158) | | |

TABLE 6
Activation by Hedione HC of OR5B12 variants with the optimized C-terminus
containing additional residues at amino acid positions 17-20

| | % of the activation by the optimized | |
|---|---|---|
| | sequence RNKEVKDALKRLLKRKCC | |
| C-terminal Sequence | 31 μM Hedione HC | 62.5 μM Hedione HC |
| Wild Type | 18.3 | 8.0 |
| RNKEVKDALKRLLKRKCC (SEQ ID | 100 | 100 |
| NO: 86) | | |
| RNKEVKDALKRLLKRKCCC (SEQ ID | 168.91 | 121.37 |
| NO: 134) | | |
| RNKEVKDALKRLLKRKCCF (SEQ ID | 207.32 | 127.22 |
| NO: 135) | | |
| RNKEVKDALKRLLKRKCCL (SEQ ID | 533.84 | 189.64 |
| NO: 136) | | |
| RNKEVKDALKRLLKRKCCM (SEQ ID | 177.47 | 182.76 |
| NO: 137) | | |
| RNKEVKDALKRLLKRKCCS (SEQ ID | 176.99 | 75.63 |
| NO: 138) | | |
| RNKEVKDALKRLLKRKCCP (SEQ ID | 98.68 | 98.17 |
| NO: 139) | | |
| RNKEVKDALKRLLKRKCCA (SEQ ID | 230.04 | 143.71 |
| NO: 140) | | |
| RNKEVKDALKRLLKRKCCY (SEQ ID | 298.48 | 274.09 |
| NO: 141) | | |
| RNKEVKDALKRLLKRKCCH (SEQ ID | 142.62 | 129.19 |
| NO: 142) | | |
| RNKEVKDALKRLLKRKCCN (SEQ ID | 137.13 | 91.94 |
| NO: 143) | | |
| RNKEVKDALKRLLKRKCCD (SEQ ID | 86.54 | 56.54 |
| NO: 144) | | |
| RNKEVKDALKRLLKRKCCK (SEQ ID | 280.71 | 237.30 |
| NO: 145) | | |
| RNKEVKDALKRLLKRKCCR (SEQ ID | 619.88 | 248.52 |
| NO: 146) | | |
| RNKEVKDALKRLLKRKCCG (SEQ ID | 394.57 | 300.08 |
| NO: 147) | | |
| RNKEVKDALKRLLKRKCRR (SEQ ID | 181.2 | 189.0 |
| NO: 148) | | |
| RNKEVKDALKRLLKRKCRRR (SEQ | 254.8 | 231.7 |
| ID NO: 149) | | |
| RNKEVKDALKRLLKRKCRKK (SEQ | 182.3 | 145.7 |
| ID NO: 150) | | |
| RNKEVKDALKRLLKRKCCRR (SEQ | 240.6 | 229.5 |
| ID NO: 151) | | |
| RNKEVKDALKRLLKRKCCRRR (SEQ | 250.7 | 233.4 |
| ID NO: 156) | | |
| RNKEVKDALKRLLKRKCCRRRR | 244.3 | 239.6 |
| (SEQ ID NO: 219) | | |

TABLE 7
Activation by cyclopentanethiol of OR2T4 variants with the optimized C-terminus
containing additional basic residues at amino acid positions 17-20.

| | % of the activation by the optimized sequence | |
|---|---|---|
| | RNKEVKDALKRLLKRKCC | |
| C-terminal Sequence | 4 μM 2-methyl-3- | 8 μM 2-methyl-3- |
| | tetrahydrofuranethiol | tetrahydrofuranethiol |
| Wild Type | 18.3 | 8.0 |
| RNKEVKDALKRLLKRKCC (SEQ ID | 100 | 100 |
| NO: 86) | | |
| RNKEVKDALKRLLKRKCRR (SEQ | 101.4 | 110.0 |
| ID NO: 133) | | |
| RNKEVKDALKRLLKRKCRRR | 108.0 | 135.7 |
| (SEQ ID NO: 149) | | |
| RNKEVKDALKRLLKRKCRKK | 94.8 | 96.5 |
| (SEQ ID NO: 150) | | |

*For optimal activity, 30 μM of copper was added to the assay with OR2T4 (added as CuCl₂).

### Example 10: Flexibility of the C-Terminal Sequence: Combinations of Functional Base Substitutions

[0659] As shown in Examples 6-9, next to the optimized sequence of Examples 1-5, functional variants were identified at single amino acid positions within the first 16-amino acids of RNKEVKDALKRLLKRKCC (SEQ ID NO: 86), corresponding to RNKEVKDALKRLLKRK (SEQ ID NO: 10) and within the optional additional C-terminal cysteine residues at positions 17-22. It is here further demonstrated that these functional variants can be combined with each other, providing many different functional variants of the C-terminus and in some combinations even variants with further improved activity as compared to SEQ ID NO: 86.

[0660] Table 8 lists variants of the C-terminal sequence described in Examples 6, 7 and 9 combined into the same C-terminal sequence and fused to OR7C1. The method used and the way of calculating the results is the same as in Examples 6-8.

[0661] As is evident from the results, the functional variants combined in the same C-terminal sequence gave all functional combinations, and by combining variants with enhanced functionality, even further enhanced variants of the C-terminal sequence were obtained. Next to the improved response at two specific screening concentrations as shown in Table 8, this improvement is also obvious from a dose response analysis as shown in a representative example in FIG. 11.

TABLE 8
Activation by Ambermax of OR7C1 variants with the optimized C-terminus
containing multiple base substitutions selected from the active variants
identified in examples 6, 7 and 9. Variant residues as compared to SEQ ID
NO: 86 are in bold and underlined.

| | % of the activation by the optimized | |
|---|---|---|
| | sequence RNKEVKDALKRLLKRKCC | |
| C-terminal Sequence | 1 μM Ambermax | 3.1 μM Ambermax |
| Wild Type | 0.5 | 4.4 |
| RNKEVKDALKRLLKRKCC (SEQ ID NO: | 100 | 100 |
| 86) | | |

Active variants

| | | |
|---|---|---|
| RNKEVKRAIKRLLKRKCC (SEQ ID NO: | 262.4 | 164.0 |
| 114) | | |
| RNKEVKRAIKRLFKRKCC (SEQ ID NO: | 393.9 | 195.4 |
| 116) | | |
| Complete OR7C1 modified sequence | | |
| included as SEQ ID NO: 247 | | |
| RNKEVKKAIKRLFKRKCC (SEQ ID NO: | 310.7 | 180.2 |
| 117) | | |
| RNKEVKRAIRKLLKRKCC (SEQ ID NO: | 288.9 | 186.1 |
| 118) | | |
| RNKEVKRAIKRLLKRKCR (SEQ ID NO: | 346.4 | 189.0 |
| 121) | | |
| RNKEVKKAIKRLLKRKCR (SEQ ID NO: | 258.8 | 155.8 |
| 122) | | |
| RNKEVKDALRKLLKRKCC (SEQ ID NO: | 157.1 | 101.4 |
| 119) | | |
| RNKEVKDALKRLLRRRCC (SEQ ID NO: | 90.4 | 101.5 |
| 120) | | |
| RNKEVKRALKRLLKRKRR (SEQ ID NO: | 312.9 | 252.4 |
| 123) | | |
| RNKEVKRALKRLLKRKYP (SEQ ID NO: | 239.7 | 140.9 |
| 124) | | |
| RNKEVKRALKRLLKRKRF (SEQ ID NO: | 254.2 | 181.8 |
| 125) | | |
| RNKEVKRALKRLLKRKFK (SEQ ID NO: | 280.9 | 174.8 |
| 126) | | |
| RNKEVKKALKRLLKRKRR (SEQ ID NO: | 308.5 | 189.5 |
| 127) | | |
| RNKEVKKALKRLLKRKYP (SEQ ID NO: | 206.9 | 144.4 |
| 128) | | |
| RNKEVKKALKRLLKRKRF (SEQ ID NO: | 294.8 | 187.8 |
| 129) | | |
| RNKEVKKALKRLLKRKFK (SEQ ID NO: | 286.4 | 185.9 |
| 130) | | |
| RNKEVKKAIKRLFKRKCCRRR (SEQ ID | 498.6 | 298.3 |
| NO: 221) | | |
| Complete OR7C1 modified sequence | | |
| included as SEQ ID NO: 248 | | |

### Example 11: Flexibility of the C-Terminal Sequence: Testing Functional Variants with Different Parent Receptors

[0662] As shown in Example 2, the sequence RNKEVKDALKRLLKRKCC (SEQ ID NO: 86) is functionally improving the response of a multitude of receptors. As further shown in Examples 6-10, functional variants of the optimized C-terminal sequence of Examples 1-5 could be identified, which are still active or even have improved activity when tested with OR7C1. It was further tested for functional variants and especially combinations of variants from Examples 6-10 whether they are also broadly applicable to different ORs.

[0663] Variants of the sequence RNKEVKDALKRLLKRKCC (SEQ ID NO: 86) were fused to OR51B12 and transfected in HEK293T cells which had been stably transfected with a DNA sequence coding for functional variants of the human RTP1 S (V227I, SEQ ID NO: 84) and RTP2 (L220R, SEQ ID NO: 85). Cells were then stimulated with 31 NM and 62.5 NM of Hedione HC and the fold-induction of luciferase was compared to the fold-induction in the equal experiment conducted on the receptor with the standard sequence RNKEVKDALKRLLKRKCC (SEQ ID NO: 86), which was set to 100%, and with the wild-type.

[0664] As shown in Table 9, the combinations of variants identified to maintain or improve expression of OR7C1 (Example 10) also significantly further improved the expression of OR5B112 proving that the identified variants can be generalized and applied to other OR.

TABLE 9
Activation by Hedione HC of OR5B12 variants with the optimized C-
terminus containing multiple base substitutions selected from the variants
identified in Examples 6-9.

| | % of the activation by the optimized | |
|---|---|---|
| | sequence RNKEVKDALKRLLKRKCC | |
| C-terminal Sequence | 31 μM Hedione HC | 62.5 μM Hedione HC |
| Wild Type | 18.3 | 8.0 |
| RNKEVKDALKRLLKRKCC (SEQ ID NO: 86) | 100 | 100 |
| RNKEVKRAIKRLLKRKCR (SEQ ID NO: 121) | 342.8 | 242.1 |
| RNKEVKKAIKRLLKRKCR (SEQ ID NO: 122) | 331.3 | 222.3 |
| RNKEVKRAIRKLLKRKCC (SEQ ID NO: 118) | 126.2 | 136.1 |
| RNKEVKRAIKRLLKRKCC (SEQ ID NO: 114) | 317.8 | 195.1 |
| RNKEVKKAIKRLLKRKCC (SEQ ID NO: 115) | 349.2 | 242.5 |
| RNKEVKRAIKRLFKRKCC (SEQ ID NO: 116) | 433.2 | 303.9 |
| Complete OR5B12 modified sequence | | |
| included as SEQ ID NO: 251 | | |
| RNKEVKKAIKRLFKRKCC (SEQ ID NO: 117) | 435.4 | 282.5 |
| RNKEVKKAIKRLLKRKCCRRR (SEQ ID NO: | 1092.9 | 922.2 |
| 220) | | |
| RNKEVKKAIKRLFKRKCCRRR (SEQ ID NO: | 1032.2 | 676.0 |
| 221) | | |
| Complete OR5B12 modified sequence | | |
| included as SEQ ID NO: 252 | | |

[0665] Similarly, variants of the sequence RNKEVKDALKRLLKRKCC (SEQ ID NO: 86) were fused to R2T4 and transfected in HEK293T cells which had been stably transfected with a DNA sequence coding for functional variants of the human RTP1 S (V227I, SEQ ID NO: 84) and RTP2 (L220R, SEQ ID NO: 85). Cells were then stimulated with 4 μM and 8 μM of 2-methyl-3-tetrahydrofuranethiol and the fold-induction of luciferase was compared to the fold-induction in the equal experiment conducted on the standard sequence RNKEVKDALKRLLKRKCC (SEQ ID NO: 86), which was set to 100%, and with the wild-type.

[0666] As shown in Table 10 the combinations of variants identified to maintain or improve expression of OR7C1 (Example 9) were all active when tested with OR2T4: For this receptor they did not further improve the functional activity; however, they were not detrimental for the activity either, indicating that in a library with the same C-terminus added to every OR, these variants may be still be preferred, as they only improve or maintain the activity, but do not compromise the activity of the receptors.

TABLE 10
Activation by 2-methyl-3-tetrahydrofuranethiol of OR2T4 variants with the
optimized C-terminus containing multiple base substitutions selected from the
variants identified in Examples 6-9.

| | % of the activation by the optimized sequence | |
|---|---|---|
| | RNKEVKDALKRLLKRKCC | |
| | 4 μM 2-methyl-3- | 8 μM 2-methyl-3- |
| | tetrahydrofuranethiol | tetrahydrofuranethiol |
| Wild Type | 18.3 | 8.0 |
| RNKEVKDALKRLLKRKCC (SEQ ID | 100 | 100 |
| NO: 86) | | |
| RNKEVKRAIKRLLKRKCC (SEQ ID | 108.8 | 116.6 |
| NO: 114) | | |
| RNKEVKKAIKRLLKRKCC (SEQ ID | 103.1 | 115.2 |
| NO: 115) | | |
| RNKEVKRAIRKLLKRKCC (SEQ ID | 80.6 | 98.4 |
| NO: 118) | | |
| RNKEVKRAIKRLLKRKCR (SEQ ID | 139.9 | 150.6 |
| NO: 121) | | |
| RNKEVKKAIKRLLKRKCR (SEQ ID | 97.3 | 102.0 |
| NO: 122) | | |
| RNKEVKRAIKRLFKRKCC (SEQ ID | 63.3 | 77.0 |
| NO: 116) | | |
| Complete OR2T4 modified | | |
| sequence included as SEQ ID | | |
| NO: 249 | | |
| RNKEVKKAIKRLFKRKCC (SEQ ID | 96.2 | 88.2 |
| NO: 117) | | |
| RNKEVKKAIKRLLKRKCCRRR | 76.6 | 61.9 |
| (SEQ ID NO: 220) | | |
| RNKEVKKAIKRLFKRKCCRRR | 103.1 | 130.4 |
| (SEQ ID NO: 221) | | |
| Complete OR2T4 modified | | |
| sequence included as SEQ ID | | |
| NO: 250 | | |

[0667] A variant of the sequence motif RNKEVKDALKRLLKRKCC was further also tested with R5A2 as shown in Table 11. Similar to OR2T4 the identified variant was also fully functional when applied to OR5A2, although it did not further enhance activity (which is already very high with induction by Muscone starting at 0.03 μM).

TABLE 11
Dose-dependent induction OR5A2 with two different variants of the C-terminal sequence motif
(Shown is fold-induction of luciferase)

| | Concentration of muscone (μM) | | | | | | |
|---|---|---|---|---|---|---|---|
| OR5A2 | 0.01 | 0.03 | 0.10 | 0.32 | 1.00 | 3.16 | 10.00 |
| RNKEVKDALKRLLKRKCC SEQ ID | 1.07 | 1.48 | 3.57 | 10.02 | 21.98 | 31.84 | 33.98 |
| NO: 86) | | | | | | | |
| RNKEVKKAIKRLFKRKCC (SEQ ID | 0.96 | 1.39 | 3.49 | 9.33 | 19.44 | 27.31 | 30.34 |
| NO: 117) | | | | | | | |

### Example 12: Replacing the C-Terminal Sequence in Class I Olfactory Receptors with the Optimal C-Terminal Sequence Originally Derived from Class II OR

[0668] The optimized sequence in Examples 1-5 was originally derived by mutating the C-terminal sequence of the Class II OR5AN1. The C-terminal sequences of class I OR are widely diverging from the class II sequences, also leading to a different C-terminus consensus sequence for class I receptors (Kotthoff et al. 2021, see supra). It was thus further tested, whether the optimized C-terminal sequence developed starting from a class II receptor can also be applied to a class I receptor. Surprisingly, indeed this sequence also led to clearly enhanced expression of several class I receptors as already summarized in example 2 for OR52A5, OR52E8 and OR56A4. A more detailed comparison is given in FIG. 12 and FIG. 13.

[0669] Activation of OR52E8 by odorant acids present in human sweat (Natsch et al. A specific bacterial aminoacylase cleaves odorant precursors secreted in the human axilla. The Journal of biological chemistry 2003; 278(8):5718-5727) was investigated with different variants of the parent receptor sequence. The wild-type variant was not activated by the acids. Replacing the wild-type C-terminus with the C-terminal sequence of the functional OR51E1 did not provide a functional OR52E8. However, using the optimized sequence from Examples 1-5 led to a strong signal upon addition of 3-methyl-3-hydroxy hexanoic acid.

[0670] Activation of OR56A4 by acids of different chain length was further tested. The wild-type was activated at high concentration by decanoic acid and undecanoic acid, but not by nonanoic acid. Replacing the wild-type with the C-terminal sequence of the functional OR51E1 did reduce activity. However, using the optimized sequence form Examples 1-5 led to a strong signal and much lower detection threshold upon addition of all three acids.

### Example 13: Replacing the C-Terminal Sequence of a Poorly Functional Receptor with the C-Terminal Sequence of a Functional Receptor as Compared to Adding the Optimal C-Terminal Sequence of this Disclosure

[0671] Knowing the importance of the C-terminal sequence for proper expression as observed in the previous examples, an obvious way to improve expression might be just to provide a hybrid receptor whereby the C-terminal domain in a non-functional or poorly functional receptor is replaced by the C-terminal domain of a functional receptor. Although this approach was tested in the past (Ikegami et al. 2020, see supra) whereby the C-terminus of the poorly expressed mouse Olf541 was replaced with the C-terminus of the well expressed Olfr539 and did not lead to enhanced expression of Olfr541, this approach was further tested in a comparative example with different human ORs. Thus the C-terminal sequence of OR8K3 was replaced with the C-terminal sequence of the ambrettolide-receptor OR1N2 or the musk receptor OR5AN1. For both of these receptors the wild-type is functional, indicating that they can properly function with their native C-terminal sequence and hence this C-terminal sequence in principle can provide for functional expression. However, modified OR8K3 variants with either of these C-terminal sequences did not show any functional response to the cognate ligand menthol (FIG. 14), while the modified receptor with the C-terminal sequence according to examples 1-5 led to strong functional expression. Thus the improvement achieved with the modified C-terminal sequences of this disclosure cannot be achieved by simply generating chimeric receptors combining a functional C-terminal domain of a functional receptor with a poorly expressed receptor.

[0672] Similarly, the C-terminal sequence of OR5AN1 was replaced with the C-terminal sequence of the ambrettolide receptor OR1N2. For both of these receptors the wild-type is functional, indicating that they can properly function with their native C-terminal sequence. However, the chimeric OR5AN1 variant with the C-terminal sequence of OR1N2 is not showing any functional response to the cognate ligands Musk ketone or Muscone (FIG. 15).

[0673] Similarly, musk receptor OR5A2 with the C-terminal sequence of OR1N2 has a poor sensitivity as compared to the variant receptor of this disclosure with the C-terminal sequence RNKEVKDALKRLLKRKCC (FIG. 16).

[0674] Thus, the improvement achieved with the modified C-terminal sequences of this disclosure cannot be achieved by simply generating chimeric receptors combining a functional C-terminal domain of a functional receptor with a poorly expressed receptor.

### Example 14: Screening of Odorants with the Desired Odor Quality of Arborone Using the Optimized C-Terminus Sequence RNKEVKDALKRLLKRKCC (SEQ ID NO: 86)

[0675] The modified variant of OR7A17 with the optimized C-terminus sequence RNKEVKDALKRLLKRKCC (SEQ ID NO: 86) as described in Example 2 was tested on Arborone, the key characteristic odorous component of the complex substance Iso E Super (Hong & Corey. Enantioselective syntheses of georgyone, arborone, and structural relatives. Relevance to the molecular-level understanding of olfaction. Journal of the American Chemical Society 2006; 128(4):1346-1352). As shown in FIG. 17, Arborone activates OR7A17 with the optimized C-terminus already down to a concentration of 1 nanomolar, i.e. at ca. 50 times lower concentration than Iso E super indicating that the hybrid OR7A17 with the optimized C-terminus is a powerful tool to screen for the desired woody character of Arborone. Thus, a number (n=22) of woody fragrance molecules were tested for both the odor detection threshold (OTH) in humans in vivo and the in vitro EC50 on the OR7A17 with the optimized C-terminus sequence RNKEVKDALKRLLKRKCC (SEQ ID NO: 86). As shown in FIG. 18, the in vitro data predict well the low odour detection threshold of Ambrofix, Georgywood and Iso E super (Highlighted and with chemicals structure at the bottom left), discriminating them from odorants of intermediate potency and the much less active (both in vitro and in vivo) Cedrol (Highlighted top right).

### Example 15. Screening for Receptor Activation by Key Human Sweat Odorant

[0676] The most pungent odorant in human axillary sweat with an ODT of 1 picogram/L air is 3-methyl-3-sulfanyl-hexanol (also known as 3-methyl-3-mercapto-hexanol) (Natsch et al. Identification of Odoriferous Sulfanylalkanols in Human Axilla Secretions and Their Formation through Cleavage of Cysteine Precursors by a C-S Lyase Isolated from Axilla bacteria. Chemistry and Biochemistry 2004; 1:1058-1072). So far, no OR has been described which can selectively detect this key odorant leading to undesired axilla odor in human subjects. By screening a library of receptor variants with the C-terminal sequence SEQ ID NO: 86 in presence of copper against a library of 52 sulfur compounds (see example 5), a hitherto orphan receptor, OR2M2, was identified, which is activated by 3-methyl-3-mercapto-hexanol and closely related chemicals, but not by other sulfur odorants (FIG. 19). Dose-response analysis (FIG. 20) indicated that these identified ligands can activate OR2M2 down to a concentration of 1 μM when tested in presence of copper, only, an effect which has been observed for other receptors responding to sulfur compounds. Thus, using the improved sequences of this disclosure it was for the first time possible to deorphanize OR2M2 and the modified OR2M2 with an optimized C-terminus can thus, in combination with one of its cognate ligands 3-methyl-3-sulfanyl-hexanol, 2-mercapto-2-methyl-pentanol or 4-methoxy-2-methylpentane-2-thiol in the presence of copper be used as a screening target for the most potent human axillary malodorant.

[0677] The full amino acid and DNA sequences of the OR2M2 modified sequence having the modified C-terminal domain of SEQ ID NO: 86 are provided as SEQ ID NO: 245 and 246.

### Example 16: Random Permutations of the Variable Positions within the Modified C-Terminus of the Disclosure (SEQ ID NO: 1)

[0678] Random permutations of the general C-terminal sequence RN[KR][EDQ][VMIL][KR]KA[LIV][KRH][KR][LI][LIF][KRG][KR][KR]CC (SEQ ID NO: 822) linked to OR7D4 were generated based on degenerate oligonucleotides for the C-terminal domain. For this experiment, the MfeI/XhoI fragment from pcDNA3.1(+)-mmLucy-FLAG-rho-OR7D4 containing the CMV promoter and the OR coding sequence was used to replace the EcoRI/SalI fragment of pRDVCCB-CMV-dCas9-VPH-2A-Blast (Cellecta, Inc., Mountain View, USA). Complementary degenerate oligonucleotides were then used to replace the coding region of the C-terminal domain of OR71D4 (between Bsu36I and NotI). Random clones were selected, sequenced and tested for a correct open reading frame. A total of 55 clones were obtained with the correct open reading frame of OR7FD4 and a permutation of the general sequence RN[KR][EDQ][VMIL][KR]KA[LIV][KRH][KR][LI][LIF][KRG][KR][KR]CC (SEQ ID NO: 822) as the C-terminal domain. All the different clones were compared to the wild-type sequence by the functional assay in HEK cells with the ligand Androstenone tested in a dose-response test. While the wild-type sequence is not significantly induced by 1 μM of the ligand, the induction by androstenone of the different variants is between 10.1-fold and 73.6-fold at this concentration. The EC2 for a two-fold induction of luciferase for the wild-type is at 1.71 μM, while it is reduced to 0.003-0.13 μM for the different variants, which corresponds to an improvement in the sensitivity of the assay by the modified C-terminal sequence of 13-545 fold, with a median of 125-fold improved sensitivity. These results indicate that all of the tested random permutations of the general sequence yield a clearly improved (>10 fold) sensitivity of the functional assay.

TABLE 12
Functional assay with Androstenone activating OR7D4-variants with different random
permutations of the general sequence RN[KR][EDQ][VMIL][KR]KA[LIV][KRH][KR]
[LI][LIF][KRG][KR][KR]CC as C-terminal domain (SEQ ID NO: 822).

| | EC2 (μM; concentration for 2- | | | |
|---|---|---|---|---|
| | fold luciferase induction) | | Fold induction | |
| | | Fold-improvement | luciferase | |
| C-terminal sequence | EC2 | vs. wild-type | 0.1 μM | 1 μM |
| Wild-type | 1.724 | 1.00 | 0.98 | 1.20 |
| RNKDVKGALERLLSRADSCP | | | | |
| (SEQ ID NO: 253) | | | | |
| RNKEVKDALKRLLKRKCC | 0.007 | 249.44 | 22.17 | 39.16 |
| (SEQ ID NO: 86) | | | | |
| RNREMRKALHRLLGKKCC (SEQ | 0.011 | 156.27 | 16.54 | 60.68 |
| ID NO: 254) | | | | |
| RNREVKKAIHKLIGRKCC (SEQ | 0.010 | 164.23 | 26.43 | 51.99 |
| ID NO: 255) | | | | |
| RNREVRKAVHRLFKRKCC (SEQ | 0.004 | 385.42 | 40.68 | 69.14 |
| ID NO: 256) | | | | |
| RNKEMKKAIHKLFGKKCC (SEQ | 0.010 | 172.96 | 10.77 | 62.06 |
| ID NO: 257) | | | | |
| RNRDVKKAVHKLFRRKCC (SEQ | 0.011 | 152.59 | 12.21 | 34.24 |
| ID NO: 258) | | | | |
| RNRDMKKAVHKLFGKRCC (SEQ | 0.020 | 84.30 | 9.69 | 30.79 |
| ID NO: 259) | | | | |
| RNKELRKALHKLLGRKCC (SEQ | 0.043 | 39.74 | 4.33 | 24.97 |
| ID NO: 260) | | | | |
| RNRDVRKALRRILRRRCC (SEQ | 0.004 | 427.69 | 26.04 | 37.97 |
| ID NO: 261) | | | | |
| RNKDVRKAVRKLIRRRCC (SEQ | 0.010 | 165.32 | 18.24 | 39.01 |
| ID NO: 262) | | | | |
| RNRDVRKAVRRLFRKRCC (SEQ | 0.006 | 304.87 | 26.03 | 44.54 |
| ID NO: 263) | | | | |
| RNKDIKKAVKKLIKKKCC (SEQ | 0.048 | 36.01 | 3.79 | 23.26 |
| ID NO: 264) | | | | |
| RNRELRKAVRRLFKRRCC (SEQ | 0.022 | 78.45 | 9.89 | 34.10 |
| ID NO: 265) | | | | |
| RNKELRKAVRKIIKKKCC (SEQ | 0.041 | 41.85 | 4.56 | 24.36 |
| ID NO: 266) | | | | |
| RNRDVKKAVRRLFRRKCC (SEQ | 0.006 | 266.97 | 26.35 | 43.28 |
| ID NO: 267) | | | | |
| RNREVRKALRRIIRKRCC (SEQ | 0.003 | 545.04 | 26.72 | 40.53 |
| ID NO: 268) | | | | |
| RNKDIRKAVKKIFRRKCC (SEQ | 0.026 | 65.26 | 9.98 | 24.73 |
| ID NO: 269) | | | | |
| RNKDVRKAVRRLIKRKCC (SEQ | 0.012 | 145.78 | 16.11 | 34.08 |
| ID NO: 270) | | | | |
| RNRDLRKAVRKLFKKKCC (SEQ | 0.030 | 56.86 | 8.45 | 24.67 |
| ID NO: 271) | | | | |
| RNRDLRKALRRIFKRRCC (SEQ | 0.013 | 136.52 | 16.54 | 35.68 |
| ID NO: 272) | | | | |
| RNRDVRKAIKKLIRKRCC (SEQ | 0.005 | 373.12 | 19.39 | 29.11 |
| ID NO: 273) | | | | |
| RNKELKKAIKRILKKKCC (SEQ | 0.095 | 18.20 | 2.07 | 17.21 |
| ID NO: 274) | | | | |
| RNRDVRKAIRKLLKRKCC (SEQ | 0.005 | 323.20 | 20.67 | 28.85 |
| ID NO: 275) | | | | |
| RNRDLRKAVRRIFKKRCC (SEQ | 0.034 | 50.55 | 7.49 | 21.84 |
| ID NO: 276) | | | | |
| RNRDVRKAVRKLFKRRCC (SEQ | 0.005 | 325.72 | 18.86 | 33.06 |
| ID NO: 277) | | | | |
| RNRDVRKALRRLFKKRCC (SEQ | 0.003 | 522.64 | 23.07 | 31.19 |
| ID NO: 278) | | | | |
| RNKELKKALRKLIGKKCC (SEQ | 0.098 | 17.53 | 2.05 | 15.68 |
| ID NO: 279) | | | | |
| RNREMRKAIKKIIKKKCC (SEQ | 0.009 | 187.06 | 15.65 | 28.32 |
| ID NO: 280) | | | | |
| RNKEIKKAIKKIIKKRCC (SEQ | 0.029 | 60.06 | 6.72 | 19.26 |
| ID NO: 281) | | | | |
| RNRDVKKAIRRLFRRRCC (SEQ | 0.007 | 250.61 | 16.43 | 28.10 |
| ID NO: 282) | | | | |
| RNREVKKAVKKLIGKRCC (SEQ | 0.013 | 128.83 | 17.55 | 40.31 |
| ID NO: 283) | | | | |
| RNREMRKALRRLFRKRCC (SEQ | 0.003 | 545.04 | 52.31 | 73.63 |
| ID NO: 284) | | | | |
| RNKELKKALRRLIGRRCC (SEQ | 0.042 | 41.00 | 3.18 | 22.10 |
| ID NO: 285) | | | | |
| RNRDVKKALRKLIGKRCC (SEQ | 0.003 | 545.04 | 38.03 | 58.63 |
| ID NO: 286) | | | | |
| RNREVKKAVKKLIRRKCC (SEQ | 0.012 | 144.06 | 15.57 | 34.00 |
| ID NO: 287) | | | | |
| RNKEVRKALKKLFGKKCC (SEQ | 0.006 | 294.52 | 17.84 | 28.81 |
| ID NO: 288) | | | | |
| RNKEIRKALRRLFGKKCC (SEQ | 0.014 | 119.65 | 15.79 | 34.07 |
| ID NO: 289) | | | | |
| RNKDVKKALRRLFGKKCC (SEQ | 0.008 | 225.85 | 17.08 | 27.45 |
| ID NO: 290) | | | | |
| RNKELKKAIKRLIRRKCC (SEQ | 0.113 | 15.28 | 1.75 | 22.34 |
| ID NO: 291) | | | | |
| RNKDVRKAVKRLLKKRCC (SEQ | 0.018 | 94.88 | 8.46 | 25.66 |
| ID NO: 292) | | | | |
| RNKELRKAIRRLLRRRCC (SEQ | 0.068 | 25.22 | 2.76 | 19.39 |
| ID NO: 293) | | | | |
| RNRDIRKALRKLFKKKCC (SEQ | 0.008 | 224.95 | 17.51 | 34.30 |
| ID NO: 294) | | | | |
| RNRELKKALRRLLRRRCC (SEQ | 0.033 | 51.89 | 6.72 | 23.71 |
| ID NO: 295) | | | | |
| RNREVKKALRRLFGKKCC (SEQ | 0.003 | 525.05 | 21.37 | 35.71 |
| ID NO: 296) | | | | |
| RNRDVRKALKRLLKRKCC (SEQ | 0.005 | 337.39 | 14.08 | 29.20 |
| ID NO: 297) | | | | |
| RNRDMRKAIRKLFGRKCC (SEQ | 0.011 | 162.22 | 15.47 | 28.10 |
| ID NO: 298) | | | | |
| RNRELKKAIRKLLKRKCC (SEQ | 0.093 | 18.62 | 2.09 | 17.32 |
| ID NO: 299) | | | | |
| RNRDIRKAVKKLFGKKCC (SEQ | 0.020 | 87.76 | 9.15 | 24.73 |
| ID NO: 300) | | | | |
| RNKEVKKAIRKLFGRRCC (SEQ | 0.013 | 128.57 | 13.30 | 29.02 |
| ID NO: 301) | | | | |
| RNREVRKAVRKLFRRKCC (SEQ | 0.014 | 126.99 | 12.90 | 24.63 |
| ID NO: 302) | | | | |
| RNRDMKKALKKLFRRRCC (SEQ | 0.011 | 150.37 | 13.65 | 18.28 |
| ID NO: 303) | | | | |
| RNRDVRKALKRLLGRRCC (SEQ | 0.006 | 292.59 | 14.06 | 24.75 |
| ID NO: 304) | | | | |
| RNKDLKKAVKKLFGRKCC (SEQ | 0.131 | 13.15 | 1.63 | 10.13 |
| ID NO: 305) | | | | |
| RNKDVRKAVRRLFGRRCC (SEQ | 0.017 | 103.17 | 9.29 | 22.60 |
| ID NO: 306) | | | | |

[0679] The results of Table 12 were evaluated to derive, at each variable position in the general sequence, the best amino acid residue (i.e. the residue which gives the lowest median EC2 for sequences containing it at the given position). Based on this analysis, the statistically optimal sequence within the general sequence is RNRDVRKALRRLFRKK (SEQ ID NO: 307) and—because R at position 7 is at least as active as K (See Table 2 in example 6)—an optimal sequence is also RNRDVRRALRRLFRKK (SEQ ID NO: 308). The data from Table 12 were then further analysed for each sequence permutation as to how many residues differ from the statistically optimal sequence. As shown in Table 13, those sequences closest to SEQ ID NO: 307 have an overall better activity. Thus, while all tested random permutations within the general sequence are active, the most active sequences cluster among those which are closest to the optimal sequence. Thus, to name examples, the sequences with 2-4 residues difference from SEQ ID NO: 307 are particularly active and—with only one exception—give >100 fold improvement in sensitivity over the wild-type.

TABLE 13
Relationship of the distance between the random sequence permutations
in Table A to the optimal SEQ ID NO: 307 and activity.

| | EC2 (μM; concentration for 2- | | | |
|---|---|---|---|---|
| | fold luciferase induction) | | | |
| | | Median Fold- | Median Fold | |
| Residues differing from | Median | improvement | induction luciferase | |
| statistically best sequence | EC2 | vs. wild-type | 0.1 μM | 1 μM |
| Wild-type | 1.724 | 1.00 | 0.98 | 1.20 |
| RNKDVKGALERLLSRADSCP | | | | |
| (SEQ ID NO: 253) | | | | |
| 2 | 0.004 | 413.8 | 24.6 | 37.9 |
| 3 | 0.006 | 267.0 | 21.4 | 35.7 |
| 4 | 0.007 | 250.6 | 15.8 | 29.2 |
| 5 | 0.011 | 162.2 | 16.5 | 29.1 |
| 6 | 0.018 | 94.9 | 9.9 | 25.7 |
| 7 | 0.026 | 65.3 | 9.7 | 24.7 |
| 8 | 0.042 | 41.4 | 4.4 | 24.7 |
| 9 | 0.095 | 18.2 | 2.1 | 17.2 |
| 11 | 0.029 | 60.1 | 6.7 | 19.3 |

### Example 17: Improved Functional Expression by Different Amino Acids at Position 7 of the General Sequence

[0680] To test for possible variants of the sequence RN[KR][EDQ][VMIL][KR]xA[LIV][KRH][KR][LI][LIF][KRG][KR][KR] (SEQ ID NO: 1) leading to similar improved functional expression, different amino acids were introduced at the position 7 (denoted with an x) in the general sequence RNKEVKxALKRLLKRK (SEQ ID NO: 319) and the variants were fused after the TM7 with OR7C1. As shown in FIG. 2, OR7C1 with the C-terminal sequence RNKEVKDALKRLLKRKCC (SEQ ID NO: 86) gives around 10-fold luciferase induction at 1 μM of Ambermax and 20-fold induction at 3.1 μM of Ambermax, while the wild-type is inactive. Activation of the different modified variants were then compared as described in Example 6. Results show that position 7 of SEQ ID NO: 86 has a high flexibility, with all of the 20 amino acids except Proline showing superior activity compared to the wild type.

TABLE 14
Activation by Ambermax of OR7C1 variants with the optimized C-terminus
containing single base substitutions at position 7 of the C-terminal motif
RNKEVKDALKRLLKRKCC (SEQ ID NO: 86).

| | % of the activation by the optimized | |
|---|---|---|
| | sequence RNKEVKDALKRLLKRKCC | |
| C-terminal Sequence | 1 μM Ambermax | 3.1 μM Ambermax |
| Wild Type | 0.5 | 4.4 |
| RNKEVKDALKRLLKRKCC (SEQ ID NO: 86) | 100 | 100 |
| RNKEVKKALKRLLKRKCC (D299K) (SEQ ID | 140.8 | 98.2 |
| NO: 91) | | |
| RNKEVKEALKRLLKRKCC (D299E) (SEQ ID | 81.3 | 113.6 |
| NO: 92) | | |
| RNKEVKNALKRLLKRKCC (D299N) (SEQ ID | 95.3 | 113.5 |
| NO: 93) | | |
| RNKEVKRALKRLLKRKCC (D299R) (SEQ ID | 176.6 | 176.9 |
| NO: 94) | | |
| RNKEVKVALKRLLKRKCC (D299V) (SEQ ID | 122.1 | 108.8 |
| NO: 95) | | |
| RNKEVKAALKRLLKRKCC (D299A) (SEQ ID | 115.3 | 111.0 |
| NO: 96) | | |
| RNKEVKQALKRLLKRKCC (D299Q) (SEQ ID | 128.4 | 116.7 |
| NO: 97) | | |
| RNKEVKGALKRLLKRKCC (D299G) (SEQ ID | 41.6 | 59.8 |
| NO: 110) | | |
| RNKEVKCALKRLLKRKCC (D299C) (SEQ ID | 46.0 | 97.2 |
| NO: 321) | | |
| RNKEVKFALKRLLKRKCC (D299F) (SEQ ID | 41.1 | 68.6 |
| NO: 322) | | |
| RNKEVKHALKRLLKRKCC (D299H) (SEQ ID | 65.6 | 78.6 |
| NO: 323) | | |
| RNKEVKIALKRLLKRKCC (D299I) (SEQ ID | 81.0 | 104.0 |
| NO: 324) | | |
| RNKEVKLALKRLLKRKCC (D299L) (SEQ ID | 108.0 | 100.5 |
| NO: 325) | | |
| RNKEVKMALKRLLKRKCC (D299M) (SEQ ID | 107.6 | 113.1 |
| NO: 326) | | |
| RNKEVKPALKRLLKRKCC (D299P) (SEQ ID | −3.7 | −1.8 |
| NO: 327) | | |
| RNKEVKSALKRLLKRKCC (D299S) (SEQ ID | 99.1 | 109.7 |
| NO: 328) | | |
| RNKEVKTALKRLLKRKCC (D299T) (SEQ ID | 129.9 | 85.8 |
| NO: 329) | | |
| RNKEVKWALKRLLKRKCC (D299W) (SEQ ID | 17.4 | 26.2 |
| NO: 330) | | |
| RNKEVKYALKRLLKRKCC (D299Y) (SEQ ID | 59.4 | 69.9 |
| NO: 331) | | |

### Example 18: Screening of a Library of all Class II OR with an Identical Improved C-Terminal Domain with Single Odorants

[0681] All human class II OR and all key genetic variants of these OR were synthesized with a sequence coding for an identical modified C-terminal domain RNKEVKKAIKRLFKRKCCRRR (SEQ ID NO: 221) in the vector pcDNA3.1(+) to generate a library of all class II OR with an improved C-terminal domain. The complete list of class II OR included in this library is given in Table 15:

TABLE 15
Class II OR library members with modified C-terminal domains

| | | SEQ ID NO |
|---|---|---|
| | | DNA encoding the |
| | | modified receptor |
| | | including an N-terminal |
| | | mmLucy-FLAG-rho tag |
| | | (SEQ ID NO: 81) and a |
| | | modified C-terminus |
| # | Receptor | (SEQ ID NO: 221) |
| 1 | OR10A3 | 660 |
| 2 | OR10A4 | 661 |
| 3 | OR10A4(R262Q) | 662 |
| 4 | OR10A5 | 663 |
| 5 | OR10A6(A117V, V140G, L287P) | 664 |
| 6 | OR10A6(L287P) | 665 |
| 7 | OR10A7 | 666 |
| 8 | OR10AD1 | 667 |
| 9 | OR10AG1 | 668 |
| 10 | OR10C1 | 669 |
| 11 | OR10C1(M246V) | 670 |
| 12 | OR10D3 | 671 |
| 13 | OR10G2 | 672 |
| 14 | OR10G3(S73G) | 673 |
| 15 | OR10G4 | 674 |
| 16 | OR10G6 | 675 |
| 17 | OR10G7(T5S) | 676 |
| 18 | OR10G8 | 677 |
| 19 | OR10G9 | 678 |
| 20 | OR10H1 | 679 |
| 21 | OR10H2 | 680 |
| 22 | OR10H3(R7S, R54H) | 681 |
| 23 | OR10H3(R7S, V224M) | 682 |
| 24 | OR10H4 | 683 |
| 25 | OR10H5 | 684 |
| 26 | OR10J1(M51I, I92M) | 685 |
| 27 | OR10J5 | 686 |
| 28 | OR10K1 | 687 |
| 29 | OR10K2 | 688 |
| 30 | OR10P1 | 689 |
| 31 | OR10P1(P88L, V200M) | 690 |
| 32 | OR10Q1 | 691 |
| 33 | OR10R2 | 692 |
| 34 | OR10R2(E205G, L228F) | 693 |
| 35 | OR10S1 | 694 |
| 36 | OR10T2 | 695 |
| 37 | OR10T2(I137M, V239A) | 696 |
| 38 | OR10V1 | 697 |
| 39 | OR10W1 | 698 |
| 40 | OR10W1(R263Q) | 699 |
| 41 | OR10X1 | 700 |
| 42 | OR10Z1 | 701 |
| 43 | OR11A1 | 702 |
| 44 | OR11G2 | 703 |
| 45 | OR11G2(I65N, V82I) | 704 |
| 46 | OR11H1 | 705 |
| 47 | OR11H12 | 706 |
| 48 | OR11H2 | 707 |
| 49 | OR11H4 | 708 |
| 50 | OR11H6 | 709 |
| 51 | OR11H6(I84T, L172F, Y213H, | 710 |
| | C236R) | |
| 52 | OR11L1(G108S, F117L, A142T, | 711 |
| | R171P) | |
| 53 | OR12D2(S104F) | 712 |
| 54 | OR12D2(V47F, L56P, S104F, | 713 |
| | F113L, L120R, S121C, V159I) | |
| 55 | OR12D3 | 714 |
| 56 | OR13A1 | 715 |
| 57 | OR13C2 | 716 |
| 58 | OR13C3 | 717 |
| 59 | OR13C4 | 718 |
| 60 | OR13C5 | 719 |
| 61 | OR13C5(V117M, C189Y, M258T, | 720 |
| | I282V, M290T) | |
| 62 | OR13C8 | 721 |
| 63 | OR13C8(A19D) | 722 |
| 64 | OR13C9 | 723 |
| 65 | OR13C9(E24D, T91S) | 724 |
| 66 | OR13D1 | 725 |
| 67 | OR13D1(Q159H, S245L) | 726 |
| 68 | OR13F1(F18S, M101V, V134I, | 727 |
| | T254M) | |
| 69 | OR13G1(I132V) | 728 |
| 70 | OR13G1(K46I, M146L, R224C) | 729 |
| 71 | OR13H1 | 730 |
| 72 | OR13J1 | 731 |
| 73 | OR13J1(H133R) | 732 |
| 74 | OR14A16(I238T) | 733 |
| 75 | OR14A2 | 734 |
| 76 | OR14C36 | 735 |
| 77 | OR14C36(G225R, D231Y) | 736 |
| 78 | OR14I1(V36A, D50N, S170N) | 737 |
| 79 | OR14J1 | 738 |
| 80 | OR14K1 | 739 |
| 81 | OR1A1 | 332 |
| 82 | OR1A2 | 333 |
| 83 | OR1B1(L149S, C263W) | 334 |
| 84 | OR1C1 | 335 |
| 85 | OR1D2 | 336 |
| 86 | OR1D4(*172R) | 337 |
| 87 | OR1D5 | 338 |
| 88 | OR1E1 | 339 |
| 89 | OR1E2 | 340 |
| 90 | OR1F1 | 341 |
| 91 | OR1F1(F75S) | 342 |
| 92 | OR1F12 | 343 |
| 93 | OR1G1 | 344 |
| 94 | OR1I1 | 345 |
| 95 | OR1I1(P139R, F211L, Y252S) | 346 |
| 96 | OR1J1 | 347 |
| 97 | OR1J2 | 348 |
| 98 | OR1J4 | 349 |
| 99 | OR1K1 | 350 |
| 100 | OR1L1 | 351 |
| 101 | OR1L3 | 352 |
| 102 | OR1L4 | 353 |
| 103 | OR1L6 | 354 |
| 104 | OR1L8 | 355 |
| 105 | OR1L8(T27P, R211P) | 356 |
| 106 | OR1M1 | 357 |
| 107 | OR1N1 | 358 |
| 108 | OR1N2(W23R, V230G, T287M) | 359 |
| 109 | OR1Q1(Q24R) | 360 |
| 110 | OR1S1 | 361 |
| 111 | OR1S1(I110T, H122R, N170D, | 362 |
| | S214I) | |
| 112 | OR1S2 | 363 |
| 113 | OR2A1 | 364 |
| 114 | OR2A12 | 365 |
| 115 | OR2A14 | 366 |
| 116 | OR2A14(S133I, S164R) | 367 |
| 117 | OR2A2 | 368 |
| 118 | OR2A2(F280L) | 369 |
| 119 | OR2A25 | 370 |
| 120 | OR2A25(S75N, A209P) | 371 |
| 121 | OR2A4 | 372 |
| 122 | OR2A42 | 373 |
| 123 | OR2A5 | 374 |
| 124 | OR2A7 | 375 |
| 125 | OR2AE1 | 376 |
| 126 | OR2AE1(I77T) | 377 |
| 127 | OR2AG1 | 378 |
| 128 | OR2AG2(Y28C) | 379 |
| 129 | OR2AJ1 | 380 |
| 130 | OR2AK2(S84N) | 382 |
| 131 | OR2AK2(V188M) | 381 |
| 132 | OR2AP1 | 383 |
| 133 | OR2AT4 | 834 |
| 134 | OR2B11(I130S, V198M) | 386 |
| 135 | OR2B11(V198M, G223D) | 385 |
| 136 | OR2B2 | 387 |
| 137 | OR2B3 | 388 |
| 138 | OR2B6 | 389 |
| 139 | OR2C1 | 390 |
| 140 | OR2C3(T20A, P68S) | 391 |
| 141 | OR2D2 | 392 |
| 142 | OR2D2(M202T) | 393 |
| 143 | OR2D3 | 394 |
| 144 | OR2D3(L66I, W149S) | 395 |
| 145 | OR2F1 | 396 |
| 146 | OR2F2 | 397 |
| 147 | OR2G2 | 398 |
| 148 | OR2G2(V120L, L167P, R236G) | 399 |
| 149 | OR2G3 | 400 |
| 150 | OR2G6 | 401 |
| 151 | OR2H1 | 402 |
| 152 | OR2H2(L30F) | 403 |
| 153 | OR2H2(L30F, A48V) | 404 |
| 154 | OR2J2 | 405 |
| 155 | OR2J2(Y74H, V146A, T218A) | 406 |
| 156 | OR2J3(M261I) | 407 |
| 157 | OR2K2 | 408 |
| 158 | OR2L13 | 409 |
| 159 | OR2L2 | 410 |
| 160 | OR2L2(V259L) | 411 |
| 161 | OR2L3 | 412 |
| 162 | OR2L5 | 413 |
| 163 | OR2L8(G196C, A202T, Y217C, | 414 |
| | H226R) | |
| 164 | OR2M2 | 415 |
| 165 | OR2M3 | 416 |
| 166 | OR2M4 | 417 |
| 167 | OR2M5 | 418 |
| 168 | OR2M7 | 419 |
| 169 | OR2M7(F35L, V78A, D191N) | 420 |
| 170 | OR2S2 | 421 |
| 171 | OR2S2(R17G, M143V) | 422 |
| 172 | OR2T1 | 423 |
| 173 | OR2T10 | 424 |
| 174 | OR2T11 | 425 |
| 175 | OR2T12 | 426 |
| 176 | OR2T12(R55T) | 427 |
| 177 | OR2T2 | 428 |
| 178 | OR2T27(L36V) | 429 |
| 179 | OR2T29 | 430 |
| 180 | OR2T3 | 431 |
| 181 | OR2T33(A169V) | 432 |
| 182 | OR2T34 | 433 |
| 183 | OR2T35 | 434 |
| 184 | OR2T4 | 435 |
| 185 | OR2T5 | 436 |
| 186 | OR2T6 | 437 |
| 187 | OR2T6(S243A) | 438 |
| 188 | OR2T7 | 439 |
| 189 | OR2T8 | 440 |
| 190 | OR2V1 | 441 |
| 191 | OR2V2 | 443 |
| 192 | OR2V2(H221R) | 442 |
| 193 | OR2W1 | 444 |
| 194 | OR2W3 | 446 |
| 195 | OR2W3(R179C, V190I, E196D, | 445 |
| | M272K, M275T) | |
| 196 | OR2W5 | 447 |
| 197 | OR2Y1 | 448 |
| 198 | OR2Z1 | 449 |
| 199 | OR3A1 | 451 |
| 200 | OR3A1(R125Q) | 450 |
| 201 | OR3A2 | 452 |
| 202 | OR3A3 | 453 |
| 203 | OR4A47 | 455 |
| 204 | OR4A47(I104L, V145M) | 454 |
| 205 | OR4A5 | 456 |
| 206 | OR4B1 | 457 |
| 207 | OR4C11 | 458 |
| 208 | OR4C12(V283L) | 459 |
| 209 | OR4C13(V133I) | 460 |
| 210 | OR4C15 | 461 |
| 211 | OR4C16(T76A) | 462 |
| 212 | OR4C3 | 463 |
| 213 | OR4C3(V257M, H258L, P264S) | 464 |
| 214 | OR4C45 | 465 |
| 215 | OR4C46 | 467 |
| 216 | OR4C46(S240F) | 466 |
| 217 | OR4C5 | 468 |
| 218 | OR4C5(D77H) | 469 |
| 219 | OR4C6 | 470 |
| 220 | OR4D1 | 471 |
| 221 | OR4D10 | 472 |
| 222 | OR4D11 | 473 |
| 223 | OR4D11(F197L) | 474 |
| 224 | OR4D2 | 475 |
| 225 | OR4D5 | 476 |
| 226 | OR4D6 | 477 |
| 227 | OR4D9 | 478 |
| 228 | OR4E2 | 479 |
| 229 | OR4E2(V118M, Q234R) | 480 |
| 230 | OR4F15 | 481 |
| 231 | OR4F16 | 482 |
| 232 | OR4F17 | 483 |
| 233 | OR4F21 | 484 |
| 234 | OR4F29 | 485 |
| 235 | OR4F3 | 486 |
| 236 | OR4F4 | 487 |
| 237 | OR4F5 | 488 |
| 238 | OR4F6 | 489 |
| 239 | OR4K1 | 490 |
| 240 | OR4K13 | 491 |
| 241 | OR4K14 | 492 |
| 242 | OR4K15 | 493 |
| 243 | OR4K17 | 494 |
| 244 | OR4K17(K128N) | 495 |
| 245 | OR4K2 | 496 |
| 246 | OR4K5 | 497 |
| 247 | OR4L1(D2N, M40V, R52S, | 499 |
| | M101K, G109S) | |
| 248 | OR4L1(R52S) | 498 |
| 249 | OR4M1 | 500 |
| 250 | OR4M2 | 501 |
| 251 | OR4M2M239V, R284H) | 502 |
| 252 | OR4N2 | 503 |
| 253 | OR4N2(I76T) | 504 |
| 254 | OR4N4 | 505 |
| 255 | OR4N5 | 506 |
| 256 | OR4P4 | 507 |
| 257 | OR4Q3 | 508 |
| 258 | OR4Q3(F238L) | 509 |
| 259 | OR4S1 | 510 |
| 260 | OR4S2 | 511 |
| 261 | OR4X1 | 512 |
| 262 | OR4X2 | 513 |
| 263 | OR5A1 | 514 |
| 264 | OR5A2 | 515 |
| 265 | OR5AC2 | 516 |
| 266 | OR5AC2(M200I) | 517 |
| 267 | OR5AK2 | 518 |
| 268 | OR5AK2(M92I) | 519 |
| 269 | OR5AN1 | 520 |
| 271 | OR5AR1 | 522 |
| 272 | OR5AS1 | 523 |
| 273 | OR5AU1 | 524 |
| 274 | OR5B12 (C141R) | 525 |
| 275 | OR5B17 | 526 |
| 276 | OR5B17(L80I) | 527 |
| 277 | OR5B2 | 528 |
| 278 | OR5B2(M200T, V208A) | 529 |
| 279 | OR5B21 | 530 |
| 280 | OR5B3 | 531 |
| 281 | OR5B3(W49R, N170S, A181T, | 532 |
| | I198V, G247A) | |
| 282 | OR5C1 | 533 |
| 283 | OR5D13(C62Y) | 534 |
| 284 | OR5D14(S249A) | 535 |
| 285 | OR5D16 | 536 |
| 286 | OR5D18(N136D) | 537 |
| 287 | OR5F1 | 538 |
| 288 | OR5H1 | 539 |
| 289 | OR5H14 | 540 |
| 290 | OR5H14(G64R, Y189C) | 541 |
| 291 | OR5H15 | 542 |
| 292 | OR5H15(V108I, S148T, T167S, | 543 |
| | P165L) | |
| 293 | OR5H2 | 544 |
| 294 | OR5H6(A129P, C179R, T256A, | 545 |
| | D269N) | |
| 295 | OR5I1 | 546 |
| 296 | OR5J2 | 547 |
| 297 | OR5K1 | 548 |
| 298 | OR5K2 | 549 |
| 299 | OR5K3 | 550 |
| 300 | OR5K4 | 551 |
| 301 | OR5L1 | 552 |
| 302 | OR5L2 | 553 |
| 303 | OR5M1 | 554 |
| 304 | OR5M1(S282T) | 555 |
| 305 | OR5M10 | 556 |
| 306 | OR5M11 | 557 |
| 307 | OR5M11(S171N) | 558 |
| 308 | OR5M3 | 559 |
| 309 | OR5M8 | 560 |
| 310 | OR5M9 | 561 |
| 311 | OR5P2 | 562 |
| 312 | OR5P2(Y145C, V212I, C213S) | 563 |
| 313 | OR5P3 | 564 |
| 314 | OR5R1(C122R, A274V) | 565 |
| 315 | OR5R1(I7T, C122R, S128G) | 566 |
| 316 | OR5T1 | 567 |
| 317 | OR5T1(S157G) | 568 |
| 318 | OR5T2(V46L) | 569 |
| 319 | OR5T3 | 570 |
| 320 | OR5V1 | 571 |
| 321 | OR5W2 | 572 |
| 322 | OR6A2 | 573 |
| 323 | OR6B1 | 574 |
| 324 | OR6B2 | 575 |
| 325 | OR6B3 | 576 |
| 326 | OR6B3(C234Y) | 577 |
| 327 | OR6C1(C130Y, H165D, V246I) | 578 |
| 328 | OR6C2 | 579 |
| 329 | OR6C3 | 580 |
| 330 | OR6C4 | 581 |
| 331 | OR6C6 | 582 |
| 332 | OR6C65 | 583 |
| 333 | OR6C65(T222A) | 584 |
| 334 | OR6C68(A45T) | 585 |
| 335 | OR6C70(L181P) | 586 |
| 336 | OR6C74 | 587 |
| 337 | OR6C75 | 588 |
| 338 | OR6C76 | 589 |
| 339 | OR6F1 | 590 |
| 340 | OR6J1 | 591 |
| 341 | OR6J1(P250S) | 592 |
| 342 | OR6K2 | 593 |
| 343 | OR6K3 | 594 |
| 344 | OR6K3(P228S, P248L) | 595 |
| 345 | OR6K6 | 596 |
| 346 | OR6M1 | 597 |
| 347 | OR6N1 | 598 |
| 348 | OR6N1(I194T, F245L, Q261R) | 599 |
| 349 | OR6N2 | 600 |
| 350 | OR6P1 | 601 |
| 351 | OR6Q1 | 602 |
| 352 | OR6Q1((D100G, Y173C) | 603 |
| 353 | OR6S1(R237H) | 605 |
| 354 | OR6S1(T42I, V156I) | 604 |
| 355 | OR6T1 | 606 |
| 356 | OR6V1 | 607 |
| 357 | OR6X1 | 608 |
| 358 | OR6Y1 | 609 |
| 359 | OR7A10 | 610 |
| 360 | OR7A17 | 611 |
| 361 | OR7A5 | 612 |
| 362 | OR7C1(V126I) | 613 |
| 363 | OR7C2 | 614 |
| 364 | OR7D2 | 615 |
| 365 | OR7D4 | 616 |
| 366 | OR7E24 | 617 |
| 367 | OR7E24(P242S) | 618 |
| 368 | OR7G1 | 619 |
| 369 | OR7G1(V83A, W141C, Y252C) | 620 |
| 370 | OR7G2 | 621 |
| 371 | OR7G3 | 622 |
| 372 | OR7G3(M29V) | 623 |
| 373 | OR8A1 | 624 |
| 374 | OR8B12 | 625 |
| 375 | OR8B2 | 626 |
| 376 | OR8B3 | 627 |
| 377 | OR8B4(E22G) | 628 |
| 378 | OR8B4(Y131H, C140F, C178R) | 629 |
| 379 | OR8B8 | 630 |
| 380 | OR8D1 | 631 |
| 381 | OR8D2 | 632 |
| 382 | OR8D4(R133K, L283P) | 633 |
| 383 | OR8G1(stop259Y) | 634 |
| 384 | OR8G5 | 635 |
| 385 | OR8G5(G204E) | 636 |
| 386 | OR8H1 | 637 |
| 387 | OR8H2 | 638 |
| 388 | OR8H3(P137S) | 639 |
| 389 | OR8I2 | 640 |
| 390 | OR8J1 | 641 |
| 391 | OR8J3 | 642 |
| 392 | OR8K1 | 643 |
| 393 | OR8K3(L122R) | 644 |
| 394 | OR8K5 | 645 |
| 395 | OR8S1(M48V, L82P, A198T) | 646 |
| 396 | OR8U1 | 647 |
| 397 | OR8U8 | 648 |
| 398 | OR8U9 | 649 |
| 399 | OR9A2 | 650 |
| 400 | OR9A4 | 651 |
| 401 | OR9G1(T62I) | 652 |
| 402 | OR9G4(N191D) | 653 |
| 403 | OR9G9 | 654 |
| 404 | OR9I1 | 655 |
| 405 | OR9K2 | 656 |
| 406 | OR9K2(R23C, E81A, R185H) | 657 |
| 407 | OR9Q1 | 658 |
| 408 | OR9Q2 | 659 |

[0682] SEQ ID NOs 331-739 also include a 5′ BamHI restriction site (GGATCC) and Kozak sequence (GCCACC), and a 3′ NotI restriction site (GCGGCCGC) for cloning and expression purposes.

[0683] Parallel transfection experiments were conducted with all these plasmids (n=408) and cells expressing the different OR were stimulated with one given ligand at a time, tested at the maximal, clearly non-cytotoxic concentration. In total 26 different ligands were tested on the full library of class II receptors. For 25 of these ligands, at least one receptor was identified with a >4-fold luciferase induction over the background, indicating that a cognate receptor can be identified with these improved OR library for a majority of odorants. In general, the screening with this library yields a very good signal-to-noise ratio, clearly separating positive screening hits from inactive ligand-OR associations. As an example, the screening of the full library with the ligand Patchoulol is shown in FIG. 21. Patchoulol gave a strong induction of OR14J1 and a weak induction of OR11A1 and OR7A17. The full set of identified OR form this deorphanisation campaign is shown in Table 16.

[0684] Selected ligand—OR pairs were then tested in a confirmatory test with a dose response analysis. For all tested ligand—OR pairs from newly de-orphanized receptors (n=31), a clear dose-response was obtained when these screening hits were verified in the confirmatory tests (for examples see ORs listed in example 19 and the dose-response of Patchoulol on OR14J1 in FIG. 22), showing that with this improved OR library with a high signal-to-noise ratio, this screening leads to very reproducible ligand-OR associations. This can be compared with the state of the art technology described in Mainland et al. (2015) Sci Data 2:150002 applying OR expression with RTP1 S and a N-terminal rho-tag, but employing wild-type OR sequences. In that screening a comprehensive OR library (Class I and class II; 511 clones including key variants) was tested on 73 odorants. The initial screen gave 1572 odor/receptor pair hits (covering 394 OR), yet only for 63 clones representing only 27 OR, the associations could be verified in a dose-response analysis indicating a significant noise in the primary screen due to poor or absent expression of the wild-type sequences.

TABLE 16
Ligands tested on the full library of OR and cognate receptors identified for these ligands

| Ligand | Activated OR and OR variants |
|---|---|
| (E,S)-3,7-dimethylnon-6-en-1-ol (rosabloom) | OR1D2, OR2A25, OR2A25(S75N, A209P), OR2A5 |
| 3-Mercapto-3-methylhexan-1-ol | OR2M2, OR2V1 |
| Ambrettolide | OR1N2(W23R,V230G, T287M); OR5A2 |
| Ambrofix | OR7A17, OR7E24, OR7E24(P242S) |
| 7-(3-Methylbutyl)-benzo[b][1,4]dioxepin-3-one | OR10H1, OR10K1 |
| (Azurone) | |
| Benzaldehyde | OR5P3, OR6P1 |
| Benzyl salicylate | OR2AG2(Y28C) |
| Calone | OR10H2, OR10H5 |
| delta-Damascone | OR8K3(L122R) |
| Ethyl cyclohexanecarboxylate (Esterly) | OR2L2, OR2L2(V259L), OR2L3, OR2L5, OR11G2, |
| | OR11G2(I65N, V82I) |
| Geosmin | OR11A1 |
| Mahonial | OR10J5 |
| 3-(4-isobutyl-2-methylphenyl)propanal | OR10J5 |
| (Nympheal) | |
| Isoeugenol | OR10D3, OR10G7(T5S) |
| Muscone | OR5AN1, OR5A2 |
| Patchoulol | OR14J1, OR7A17, OR11A1 |
| Peonile | OR2A25, OR2A25(S75N, A209P), OR8H1 |
| Rotundone | OR7A10, OR7A5, OR7A17 |
| Indole | OR5P3 |
| Heliotropine | OR5P3 |
| Methyl salicylate | OR5P3 |
| Galbanone | OR11G2, OR11G2(I65N, V82I) |
| Javanol | OR7A17 |
| Timberol | OR7C1 |
| trans 2, cis 6-Nonadienal | OR10J5 |
| 2,4,6-trichloroanisol | OR5V1 |

### Example 19: Activation of OR Identified in a Screening with a Library of all Human OR with an Improved C-Terminal Domain—Comparison of Wild-Type OR with the Improved OR

[0685] The improved functional expression of receptors of the OR-library described in example 18 with the C-terminal domain RNKEVKKAIKRLFKRKCCRRR (SEQ ID NO: 221) was further analyzed. For selected receptors, the wild-type sequence was synthesized and cloned into pcDNA3.1 (+). Dose-response analysis with the cognate ligand was then performed for both the wild-type and the modified sequence. Data were analyzed for induction threshold (concentration for 2-fold luciferase induction) and for the EC50 (potency) and for maximal induction (efficacy), as done also in Table 1. As shown in Table 17, for 13 OR identified in the screening in Example C, the wild-type was completely inactive, while the OR with the optimized C-terminal domain was activated by the cognate ligands in the low micromolar range (all-or-nothing effect). This proves, that these OR could only be de-orphanized by this library of OR with improved expression by the C-terminal modification. For 9 more tested OR, the improved sequence leads to a clearly reduced detection threshold (5.2-163-fold) and increased efficacy (1.9-16.8 fold).

TABLE 17
Improved functional expression of modified OR-genes containing the optimized C-terminus
RNKEVKKAIKRLEKRKCCRRR (SEQ ID NO: 221) as compared to the wild-type sequence

| Receptor | | | | | | | | | | |
|---|---|---|---|---|---|---|---|---|---|---|
| | NCBI | | | Detection threshold; | | | | | | |
| | Gene | | | concentration for 2-fold | | | | | | |
| | ID | SEQ ID | | induction (μM) | | | Potency (μM) | | | |
| | (sequence | NO | | | | Fold | EC50 | EC50 | | Fold |
| OR | source | modified | | wild- | changed | improvement | wild- | changed | Fold- | improvement |
| (variant) | wild-type) | sequence | Ligand | type | C-term. | efficacy | type | C-term | improvement | efficacy |

a) OR which are inactive as wild-type and only active with modified C-terminal domain, only de-
orphanized by the screening of the library as described in Example B

| | | | | | | | | | | |
|---|---|---|---|---|---|---|---|---|---|---|
| OR2L3 | 391192 | SEQ ID | Esterly | no | 11.2 | n.a. | n.a. | 86.2 | n.a. | 17.1 |
| | | NO: 412 | | induction | | | | | | |
| OR2AG2 | 338755 | SEQ ID | Benzyl | no | 1.3 | n.a. | n.a. | 4.5 | n.a. | 10.2 |
| (Y28C) | | NO: 379 | salicylate | induction | | | | | | |
| OR7A5 | 26659 | SEQ ID | Rotundone | no | 0.67 | n.a. | n.a. | 5.6 | n.a. | 24. |
| | | NO: 612 | | induction | | | | | | |
| OR7E24 | 26648 | SEQ ID | Ambrofix | no | 0.47 | n.a. | n.a. | 7.7 | n.a. | 20.7 |
| | | NO: 617 | | induction | | | | | | |
| OR7A10 | 390892 | SEQ ID | Rotundone | no | 0.0058 | n.a. | n.a. | 0.16 | n.a. | 5.9 |
| | | NO: 610 | | induction | | | | | | |
| OR10H2 | 26538 | SEQ ID | Cascalone | no | 108.6 | n.a. | n.a. | 226 | n.a. | 7.0 |
| | | NO: 680 | | induction | | | | | | |
| OR10H1 | 26539 | SEQ ID | Azurone | no | 3.13 | n.a. | n.a. | 7.0 | n.a. | 10.0 |
| | | NO: 679 | | induction | | | | | | |
| OR10D3 | 26497 | SEQ ID | Isoeugenol | no | 1.4 | n.a. | n.a. | 8.4 | n.a. | 6.1 |
| | | NO: 671 | | induction | | | | | | |
| OR1D2 | 4991 | SEQ ID | rosabloom | no | 3.0 | n.a. | n.a. | 34.6 | n.a. | 14.9 |
| | | NO: 336 | | induction | | | | | | |
| OR2A5 | 393046 | SEQ ID | Rosyfolia | no | 17.6 | n.a. | n.a. | 18 | n.a. | 3.0 |
| | | NO: 374 | | induction | | | | | | |
| OR2A25 | 392138 | SEQ ID | Rosyfolia | no | 1.1 | n.a. | n.a. | 11.0 | n.a. | 7.6 |
| | | NO: 370 | | induction | | | | | | |
| OR11G2 | 390439 | SEQ ID | Galbanone | no | 8.8 | n.a. | n.a. | 2.2 | n.a. | 3.1 |
| | | NO: 703 | | induction | | | | | | |
| OR14J1 | 442191 | SEQ ID | Patchoulol | no | 0.45 | n.a. | n.a. | 2.2 | n.a. | 33.4 |
| | | NO: 738 | | induction | | | | | | |

b) OR which are active with the wild-type sequence, but for which the assay sensitivity is
significantly improved by the modified C-terminal domain

| | | | | | | | | | | |
|---|---|---|---|---|---|---|---|---|---|---|
| OR5A1 | 219982 | SEQ ID | B-lonone | 20.36 | 2.1 | 9.9 | 48.3 | 15.1 | 3.2 | 2.4 |
| | | NO: 514 | | | | | | | | |
| OR5M3 | 219482 | SEQ ID | Furaneol | 30.5 | 0.3 | 100.7 | 65.3 | 8.7 | 7.5 | 16.8 |
| | | NO: 559 | | | | | | | | |
| OR8D1 | 283159 | SEQ ID | Sotolone | 2.5 | 0.48 | 5.2 | 19.0 | 7.5 | 2.5 | 2.1 |
| | | NO: 631 | | | | | | | | |
| OR10G3 | 26533 | SEQ ID | Vanillin | 49.0 | 0.3 | 163.4 | 261 | 15.3 | 17.0 | 2.9 |
| (S73G) | | NO: 673 | | | | | | | | |
| OR10G9 | 219870 | SEQ ID | Ultravanil | 14.6 | 1.7 | 8.62 | 91.4 | 19.0 | 4.8 | 3.4 |
| | | NO: 678 | | | | | | | | |
| OR2L5 | 81466 | SEQ ID | Esterly | 40.5 | 0.26 | 158.8 | 114.6 | 4.76 | 24.1 | 2.6 |
| | | NO: 413 | | | | | | | | |
| OR8H1 | 219469 | SEQ ID | Peonile | 6.9 | 0.4 | 15.6 | 17.3 | 5.8 | 2.95 | 4.2 |
| | | NO: 637 | | | | | | | | |
| OR10K1 | 391109 | SEQ ID | Azurone | 9.4 | 0.15 | 63.4 | 6.8 | 2.2 | 3.1 | 12.4 |
| | | NO: 687 | | | | | | | | |
| OR11A1 | 26531 | SEQ ID | Geosmin | 1.23 | 0.04 | 30.7 | 6.8 | 2.2 | 3.1 | 1.9 |
| | | NO: 702 | | | | | | | | |

n.a. not applicable, cannot be calculated as wild-type is inactive

### Example 20: Optimized Expression with SEQ ID NO: 221 as Compared to SEQ ID NO: 86

[0686] All tested receptors of Table 1 gave improved functional expression when the wild-type C-terminal domain was replaced with SEQ ID NO: 86. This functional expression was further improved when SEQ ID NO:86 was replaced with SEQ ID NO: 221 as shown for OR7C1 in Table 8 and for OR5B12 in Table 9. This additive improvement was further tested with OR10H5 (Table 18) and OR7A17 (Table 19). In both cases, SEQ ID NO: 221 further improved functional expression as compared to the already strongly improved functional expression vs. wild-type when using SEQ ID NO: 86. The full DNA sequences encoding the modified receptors are SEQ ID NO: 684 for OR10H5 and SEQ ID NO: 611 for OR7A17.

TABLE 18
Improved functional expression of OR10H5

| | fold induction of luciferase | | |
|---|---|---|---|
| OR10H5 | 10 μM | 31 μM | 100 μM |
| C-terminal Sequence | Calone | Calone | Calone |
| wild-type | 1.00 | 1.21 | 2.71 |
| RNKEVKDALKRLLKRKCC (SEQ ID NO: 86) | 1.09 | 1.92 | 5.52 |
| RNKEVKKAIKRLFKRKCCRRR | 2.09 | 8.00 | 10.74 |
| (SEQ ID NO: 221) | | | |

TABLE 19
Improved functional expression of OR7A17

| | fold induction of luciferase | | | |
|---|---|---|---|---|
| OR7A17 | 0.01 μM | 0.03 μM | 0.1 μM | 0.3 μM |
| C-terminal Sequence | Ambrofix | Ambrofix | Ambrofix | Ambrofix |
| wild-type | 1.05 | 1.10 | 1.10 | 1.17 |
| RNKEVKDALKRLLKRKCC (SEQ ID NO: | 1.55 | 2.72 | 5.88 | 9.60 |
| 86) | | | | |
| RNKEVKKAIKRLFKRKCCRRR (SEQ ID | 2.63 | 5.24 | 7.75 | 11.85 |
| NO: 221) | | | | |

### Example 21: Improved C-Terminal Domains for Class I OR

[0687] Further variants of the improved C-terminal domain sequence RNKEVKDALKRLLKRKCC (SEQ ID NO: 86) and falling within the general sequence RN[KR][EDQ][VMIL][KR]xA[LIV][KRH][KR][LI][LIF][KRG][KR][KR] (SEQ ID NO: 1) with further amino acids at the C-terminal end (CC) were tested on the class I receptor OR52A5 activated by 4-ethyloctanoic acid. As shown in Table 20, SEQ ID NO: 86 gives a clearly improved expression as compared to the wild-type. This activation is further improved by either replacing amino acid position 4-6 with the sequence QIR or by adding the terminal sequence RRR.

[0688] These two improvements were further combined and the combination was tested on OR52A5 and two further class I receptors. As indicated in Table 21, all three class I receptors are highly active with the modified C-terminal sequence RNKQIRDALKRLLKRKCCRRR (SEQ ID NO: 741), with no or weak activity with the wild-type. In the case of OR52A4, 4-ethyloctanoic acid, which is detected at low concentrations by the human nose, is detected with a high luciferase response already at 0.19 μM by the receptor with the C-terminal modification showing very sensitive detection of this carboxylic acid by the modified class I receptor.

TABLE 20
Optimized C-terminal domains for Class I OR52A5

| | fold induction of luciferase by 4- | | | |
|---|---|---|---|---|
| | ethyloctanoic acid | | | |
| C-terminal Sequence | 1 μM | 3.1 μM | 10 μM | 31 μM |
| Wild-type | 0.98 | 1.13 | 1.67 | 2.13 |
| RNKEVKDALKRLLKRKCC (SEQ ID | 2.21 | 2.81 | 3.53 | 7.64 |
| NO: 86) | | | | |
| RNKQIRDALKRLLKRKCC (SEQ ID | 10.09 | 12.84 | 12.30 | 19.31 |
| NO: 740) | | | | |
| RNKEVKDALKRLLKRKCCRRR (SEQ | 9.39 | 13.73 | 14.90 | 22.00 |
| ID NO: 156) | | | | |

TABLE 21
Optimized C-terminal domains for Class I OR52E8, OR56A4 and OR52A5

| | fold induction of luciferase | | | |
|---|---|---|---|---|
| | | | 10 μM 3- | 31 μM 3- |
| | 1 μM 3-methyl-3- | 3.1 μM 3-methyl-3- | methyl-3- | methyl-3- |
| | hydroxyhexanoic | hydroxyhexanoic | hydroxyhexanoic | hydroxyhexanoic |
| | acid | acid | acid | acid |
| OR52E8-wild-type | 1.07 | 0.98 | 1.03 | 0.93 |
| OR52E8- | 4.79 | 8.52 | 13.13 | 14.20 |
| RNKQIRDALKRLLKRK | | | | |
| CC (SEQ ID NO: 740) | | | | |
| OR52E8- | 9.76 | 19.80 | 24.48 | 34.54 |
| RNKQIRDALKRLLKRK | | | | |
| CCRRR (SEQ ID NO: | | | | |
| 741) | | | | |
| | 1 μM 2- | 3.1 μM 2- | 10 μM 2- | 31 μM 2- |
| | methylundecanoic | methylundecanoic | methylundecanoic | methylundecanoic |
| | acid | acid | acid | acid |
| OR56A4-Wild Type | 0.82 | 0.85 | 0.91 | 1.82 |
| OR56A4- | 4.05 | 6.94 | 9.99 | 12.60 |
| RNKQIRDALKRLLKRK | | | | |
| CC (SEQ ID NO: 740) | | | | |
| OR56A4- | 9.19 | 14.53 | 16.91 | 22.23 |
| RNKQIRDALKRLLKRK | | | | |
| CCRRR (SEQ ID NO: | | | | |
| 741) | | | | |
| | 0.19 μM 4- | 0.78 μM 4- | 3.15 μM 4- | 12.5 μM 4- |
| | ethyloctanoic | ethyloctanoic | ethyloctanoic | ethyloctanoic |
| | acid | acid | acid | acid |
| OR52A5- | 1.03 | 1.28 | 1.35 | 1.43 |
| RNKEVKDALKRLLKRK | | | | |
| CC (SEQ ID NO: 86) | | | | |
| OR52A5- | 1.80 | 3.59 | 4.49 | 8.99 |
| RNKEVKDALKRLLKRK | | | | |
| CCRRR (SEQ ID NO: | | | | |
| 156) | | | | |
| OR52A5- | 2.48 | 3.88 | 5.00 | 7.28 |
| RNKQIRDALKRLLKRK | | | | |
| CC (SEQ ID NO: 740) | | | | |
| OR52A5- | 6.04 | 7.86 | 13.96 | 12.83 |
| RNKQIRDALKRLLKRK | | | | |
| CCRRR (SEQ ID NO: | | | | |
| 741) | | | | |

[0689] Thus, additional improved C-terminal domain general sequences are RN[KR]QIRxA[LIV][KRH][KR][LI][LIF][KRG][KR][KR] (SEQ ID NO: 822), RN[KR][EDQ][VMIL][KR]xA[LIV][KRH][KR][LI][LIF][KRG][KR][KR]RRR (SEQ ID NO: 823), and RN[KR]QIRxA[LIV][KRH][KR][LI][LIF][KRG][KR][KR]RRR (SEQ ID NO: 824).

### Example 22: Screening with a Library of all Class I OR with an Identical Improved C-Terminal Domain

[0690] All human class I OR and all key genetic variants of these OR were synthesized with a sequence coding for the identical C-terminal domain RNKQIRDALKRLLKRKCCRRR (SEQ ID NO: 741) in the vector pcDNA3.1(+) to generate a library of all class I OR with an improved C-terminal domain. The complete list of class II ORs included in this library is given in Table 22:

TABLE 22
Class I OR library members

| | | SEQ ID NO |
|---|---|---|
| | | DNA encoding the modified receptor |
| | | including an N-terminal mmLucy-FLAG-rho |
| | | tag (SEQ ID NO: 81) and a modified C- |
| # | Receptor | terminus (SEQ ID NO: 741) |
| 1 | OR51A2 | 742 |
| 2 | OR51A2(S218F, K289N) | 743 |
| 3 | OR51A4(T288M) | 744 |
| 4 | OR51A7 | 745 |
| 5 | OR51B2 | 746 |
| 6 | OR51B2(C120R, C209S, P283S) | 747 |
| 7 | OR51B2(C120R, L134F, C209S) | 748 |
| 8 | OR51B4 | 749 |
| 9 | OR51B4(V36I) | 750 |
| 10 | OR51B4(V36I, M147T) | 751 |
| 11 | OR51B5 | 752 |
| 12 | OR51B5(G5S) | 753 |
| 13 | OR51B5(I102T, P160L) | 754 |
| 14 | OR51B6 | 755 |
| 15 | OR51B6(var 3) | 756 |
| 16 | OR51D1 | 757 |
| 17 | OR51E1 | 758 |
| 18 | OR51E2 | 759 |
| 19 | OR51F1 | 760 |
| 20 | OR51F2 | 761 |
| 21 | OR51G1 | 762 |
| 22 | OR51G2 | 763 |
| 23 | OR51I1 | 764 |
| 24 | OR51I1(A252S) | 765 |
| 25 | OR51I2 | 766 |
| 26 | OR51J1 | 767 |
| 27 | OR51L1 | 768 |
| 28 | OR51M1 | 769 |
| 29 | OR51Q1 | 770 |
| 30 | OR51S1 | 771 |
| 31 | OR51S1(Q45E, L163R, L249F) | 772 |
| 32 | OR51T1 | 773 |
| 33 | OR51V1 | 774 |
| 34 | OR51V1(L30F) | 775 |
| 35 | OR52A1 | 776 |
| 36 | OR52A5 | 777 |
| 37 | OR52B2 | 778 |
| 38 | OR52B4 | 779 |
| 39 | OR52B6(V267I) | 780 |
| 40 | OR52B6(T36A, V267I) | 781 |
| 41 | OR52D1 | 782 |
| 42 | OR52E2(N5S) | 783 |
| 43 | OR52E2(H174R, R264C) | 784 |
| 44 | OR52E4 | 785 |
| 45 | OR52E4(V176I, R184M) | 786 |
| 46 | OR52E5(P234L) | 787 |
| 47 | OR52E6 | 788 |
| 48 | OR52E6 (var2) | 789 |
| 49 | OR52E8 | 790 |
| 50 | OR52H1(H124R) | 791 |
| 51 | OR52H1(A83T, H124R, G229C) | 792 |
| 52 | OR52I1(T41I) | 793 |
| 53 | OR52I2 | 794 |
| 54 | OR52I2(T141M) | 795 |
| 55 | OR52J3 | 796 |
| 56 | OR52J3(T77A, V128I, Q141L) | 797 |
| 57 | OR52K1 | 798 |
| 58 | OR52K1(Q52R) | 799 |
| 59 | OR52K2 | 800 |
| 60 | OR52L1(C125R, C146R, K168T, W282R) | 801 |
| 61 | OR52M1 | 802 |
| 62 | OR52N1(R167C, F247I) | 803 |
| 63 | OR52N1(A101T, C125Y, F247I) | 804 |
| 64 | OR52N2 | 805 |
| 65 | OR52N2(S249A, H264R) | 806 |
| 66 | OR52N4 (L167R, N218I) | 807 |
| 67 | OR52N5 | 808 |
| 68 | OR52R1 | 809 |
| 69 | OR52R1(I129T, N201Y, S245A) | 810 |
| 70 | OR52W1(H239R, L254Q) | 811 |
| 71 | OR56A1 | 812 |
| 72 | OR56A3 | 813 |
| 73 | OR56A3(M51T) | 814 |
| 74 | OR56A4 | 815 |
| 75 | OR56A5 | 816 |
| 76 | OR56B1(C103R) | 817 |
| 77 | OR56B4 | 818 |
| 78 | OR56B4(P277S) | 819 |

[0691] SEQ ID NOs 742-819 also include a 5′ BamHI restriction site (GGATCC) and Kozak sequence (GCCACC), and a 3′ NotI restriction site (GCGGCCGC) for cloning and expression purposes.

[0692] Parallel transfection experiments were conducted with all these plasmids (n=77, SEQ ID NO: 760, OR51F1 was excluded due to poor plasmid yield) and cells expressing the different OR were stimulated with one given ligand at a time. In total 10 different carboxylic acids ligands were tested on the full library of class I receptors. For 8 of these ligands, at least one receptor was identified with a >3-fold luciferase induction over the background (Table 23), indicating that a cognate receptor can be identified with these improved OR library especially for carboxylic acids.

[0693] As an example, the screening of the full library with 3-methyl-2-hexenoic acid, which is an important constituent of human sweat (Natsch et al. A specific bacterial aminoacylase cleaves odorant precursors secreted in the human axilla. The Journal of biological chemistry 2003; 278(8):5718-5727), is shown in FIG. 23. 3-methyl-2-hexenoic acid gave a strong induction of the OR51B2(C120R, L134F, C209S) variant but not of the wild-type variant of OR51B2. This is in contradiction to Li et al. (PLoS Genet. 2022 Feb. 3; 18(2):e1009564) who reported that the wild-type but not the (C120R, L134F, C209S)-variant of OR51B2 is activated by 3-methyl-2-hexenoic acid. Thus, contrary to the expression data in that publication, the (C120R, L134F, C209S)-variant of OR51B2 is a preferred target to screen antagonists for human sweat odor. In addition, 3-methyl-2-hexenoic acid activates also both tested variants of OR52K1, which are thus further new targets to screen for malodor antagonists. Next to 3-methyl-2-hexenoic acid, 4-methyl-3-hexenoic acid is also activating the (C120R, L134F, C209S)-variant of OR51B2. This acid also activates both tested variants of OR51B5. 4-methyl-3-hexenoic acid is an important contributor to the typical malodor in laundry (Kubota et al., Appl Environ Microbiol. 2012; 78(9):3317-24). Thus, screening additionally antagonists for OR51B5 can be used to target this specific malodor. For the most dominant carboxylic acid in human sweat odor, namely 3-methyl-3-hydroxyhexanoic acid, screening the complete library of class I OR found only one hit, OR52E8 confirming above results that for screening antagonists to this acid, OR52E8 variants with an improved expression by an optimized C-terminal domain are a key target. Next to OR for these short chain odorant acids, OR52K1, OR52K1(Q52R), OR56A1, OR56A3, OR56A3(M51T) and OR56A4 are activated by C8-C11 chain acids tested in this screening.

TABLE 23
Ligands tested on the full library of class I OR and cognate receptors identified for these ligands

| Ligand | Activated OR and OR variants |
|---|---|
| 3-Methyl-3-hydroxyhexanoic acid | OR52E8 |
| 3-Methyl-2-hexenoic acid | OR51B2(C120R, L134F, C209S); OR52K1; |
| | OR52K1(Q52R) |
| Octanoic acid | OR51B2(C120R, L134F, C209S); OR52A5; OR52K1; |
| | OR52K1(Q52R); OR56A1; OR56A4 |
| 4-Isopropylcyclohex-3-ene carboxylic acid | OR52E8 |
| Phenyl acetic acid | OR51B2(C120R, L134F, C209S); OR51B5; OR51B5(G5S); OR51L1 |
| 2-Methyl-undecanoic acid | OR52K1(Q52R); OR56A1; OR56A3; OR56A3(M51T); OR56A4 |
| 4-Methyl-3-hexenoic acid | OR51B2(C120R, L134F, C209S); OR51B5; OR51B5(G5S) |
| Citronellic acid | OR52K1; OR52K1(Q52R); OR56A1; OR56A4 |
| 3-Methylbutanoic acid | No activation observed |
| 2-Methyl-2-pentenoic acid | No activation observed |

### Example 23: Screening and Matching of Complex Perfumes (i.e. A Complex Odorant Mixture) with a Library of all Class II OR with an Identical Improved C-Terminal Domain

[0694] The library of human class II OR of example 18 was further tested with three perfume oils, i.e. complex mixtures of ≥24 single perfume ingredients, which are mixed in a specific ratio to give the desired overall odor. “Perfume A” and “Perfume B” are independent perfume formulations with a different overall odor impression, while “Perfume A mod” shares 66% of its ingredient with “Perfume A” and has been modified to keep the overall odor of Perfume A, but by replacing 33% of the single ingredients. In total, 18 OR and OR variants were activated by at least one of these oils with an at least 2-fold luciferase induction. The induction of these activated subset of OR by these three oils is shown in FIG. 24. As is obvious from the black and grey bars, “perfume A” and “perfume A mod” elicit a similar pattern of OR activation, while “Perfume B” is clearly different, especially in regards to the activation of OR10G7, OR11G2, OR1N2, OR2AJ1, OR2J2, OR3A3, OR5AN1, OR5B12 and OR5P3. Thus, Perfume B has a different ‘fingerprint’ of OR activation reflecting its different olfactive character. The difference/similarity of the different oils can also be quantified using a distance measure. For example, the distance between two compositions i and j can e.g. be calculated according to the following formula:

$$Distance = {\sum }_{{OR}_{1}}^{{OR}_{x}} \vert Log ( fold induction perfume i ) - Log ( fold induction perfume j ) \vert$$

[0695] For the 18 OR of FIG. 24, the distance between “perfume A” and “perfume A mod” is 2.2, while the distance between “Perfume A” and “Perfume B” is 6.4, and the distance between “Perfume A mod” and “Perfume B” is 5.5, showing the similarity between “perfume A” and “perfume A mod” and the difference of both from “perfume B”.

[0696] These results indicate that the approach of screening the sensitive library of OR with a modified C-terminal domain with complex mixtures can be used to measure similarity of complex odorant mixtures such as perfumes or flavours and give an objective representation of the olfactive profile of such mixtures.

[0697] Due to regulatory pressure, enigmatic perfumery ingredient(s) become banned in some countries. It is then desirable, to design a perfume which smells very similar to a consumer but in which the banned ingredient(s) are replaced. Classically, a single ingredient was used to try to replace the olfactory missing part after the removal of a banned ingredient. However, since single ingredients may activate multiple OR and oftentimes multiple ingredients have to be removed, it is important to replace the OR activation pattern of the removed ingredient(s) and reconstruct the overall OR activation pattern of the original perfume, which can be done by one or multiple ingredients.

[0698] This can be achieved using the method of screening single ingredients for OR activation as shown in example 18 (class II) and 22 (class I) on the full OR library with a modified C-terminal domain and recording their OR activation pattern to generate a database of activation patterns of single ingredients. Then the original perfume oil and the original perfume oil with the scrutinized ingredients removed are both screened on the full OR library as shown above. After adding selected replacing ingredients, the resulting perfume can then be validated by testing it again on the full library of OR as shown above and the similarity to the original perfume can be calculated in an objective manner.

### Example 24: Detection of a Cognate Odorant in a Complex Mixture or Reaction Mixture of Low Purity

[0699] Classically, perfumery ingredients and experimental perfumery ingredients (research samples) need to be highly pure to be evaluated by a perfumer—because the human nose has all ca. 400 OR being functional at the same time, and any odorant impurity thus will affect the overall olfactory impression of a sample, and humans thus have difficulties in judging samples of limited purity. An assay with a single or few expressed receptor(s) on the other hand is focused on one particular odor description, and can thus in principle detect an odorant with that particular odor description against a complex background. However, with a poorly expressed receptor, the matrix will interfere with the assay as the matrix ingredients will quickly reach cytotoxic concentrations in case the active ingredient for the target odor direction to be searched is present at low concentration.

[0700] To investigate sensitivity of the modified olfactory receptors of this disclosure to detect an odorant in a complex odorant matrix, the ligand Ambrofix was spiked into a complex essential oil, namely Geranium oil sourced from Egypt, containing 13 different ingredients above 1% serving as an example of a complex background matrix of strongly odorant materials. The spiking levels of Ambrofix were 0%, 0.1%, 0.316%, 1%, 3.16% and 10%. These mixtures were tested with OR7A17 with a C-terminal domain of SEQ ID 221 (a DNA sequence encoding the modified receptor is included as SEQ ID NO: 611) as described in example 20. As shown in FIG. 25, the spiked oils significantly induced luciferase expression over the background. Thus, for a potent ligand like Ambrofix, the sensitive assay can detect concentrations down to at least 0.1% of target ingredient against a complex matrix.

### Example 25: Screening a Library of OR with a Mixture of Odorants with a Particular Odor Description

[0701] Single odorants may trigger activation of multiple OR as shown by the case of Ambrofix in example 18, which activates the specific receptors OR7E24 and OR7A17. On the other hand, multiple odorants may be perceived as and described by certain common odor descriptors due to their common activation of a given set of OR. To trigger a specific odor sensation, thus a specific set of OR may need to be activated. This specific OR set can be identified by mixing several odorants with a given odor description. The mixture is then screened on the full library of OR. The identified set of OR can then be further used to screen for that particular odor description. For example, to identify a typical set of OR for the odor description of “fruity esters”, a mixture of the following compounds was made: Pentanoic acid, 2-methyl ethyl ester; Butanoic acid, 3-methyl-, ethyl ester; Acetic acid, phenoxy-, 2-propenyl ester; Hexanoic acid, ethyl ester; Acetic acid, (3-methylbutoxy)-, 2-propenyl ester; Acetic acid, (cyclohexyloxy)-, 2-propenyl ester; Butanoic acid, 2-methyl-, (3Z/E)-3-hexenyl ester; Cyclohexanecarboxylic acid, ethyl ester and Oxiranecarboxylic acid, 3-phenyl, ethyl ester. This mixture was screened against the full library of OR as described in example 18. With this approach a specific set of OR activated by ligands for this specific odor description were identified: Thus OR11 G2, OR11 G2(I65N,V82I), OR1D2, OR2AK2(S84N) and OR2L5 are identified as the set of OR most strongly activated by the mixture of fruity esters.

TABLE 24
OR identified by screening class II
OR with a mixture of fruity esters.

| | Fold luciferase |
|---|---|
| | induction (20 ppm |
| OR | fruity ester mix) |
| OR11G2 | 7.2 |
| OR11G2(I65N, V82I) | 22.6 |
| OR1D2 | 12.3 |
| OR2AK2(S84N) | 6.0 |
| OR2L5 | 8.9 |

[0702] Similarly, a mixture of odorants with fruity-lactonic descriptors was made containing equal amounts of dodecalactone delta, heptalactone gamma, octalactone gamma, nonalactone gamma, undecalactone gamma, decalactone gamma, dodecalactone gamma, decalactone delta, methyl tuberate and nectaryl. Screening the full library of class II OR with this mixture, a defined set of OR, namely OR10A3, OR10A6(A117V, V140G, L287P), OR10J1(M51 I,I92M), OR1D2 and OR2J2 was found to be activated.

TABLE 25
OR identified by screening class II
OR with a mixture of fruity lactones

| | Fold luciferase induction (20 ppm |
|---|---|
| OR | lactone mix) |
| OR10A3 | 14.3 |
| OR10A6(A117V, V140G, L287P) | 29.1 |
| OR10J1(M51I, I92M) | 23.7 |
| OR1D2 | 12.6 |
| OR2J2 | 13.8 |

[0703] In a subsequent de-convultion experiment, the single ingredients were tested in a dose-response test on all the identified OR. Table 26 lists the concentration for 2-fold luciferase induction (10-fold in the case of OR10A3). These data indicate that all the OR identified are activated by the single ingredients of the mix, with some difference in specificity. Thus, OR2AP1 and OR2J2 are particularly strongly activated by the long-chain dodecalactone gamma, while OR10A3 is very sensitive to several longer chain lactones. Overall, undecalactone gamma is the most potent ligand for four of the five identified OR which is in line with the fact that among the lactones, undecalactone gamma has the lowest olfactory detection threshold in vivo. Among the five OR, OR10A3 is the most sensitive. Thus for the most potent ligand undecalactone gamma, already at 0.31 μM, 10.2-fold activation is observed.

TABLE 26
OR identified by screening class II OR with a mixture of fruity lactones
tested with individual lactones in a dose-response analysis

| | | OR10A6 | | | |
|---|---|---|---|---|---|
| | | (A117V, | | | |
| | | V140G, | OR10J1(M51I, | | |
| | OR10A3 | L287P) | I92M) | OR2AP1 | OR2J2 |
| | (EC10; | (EC2; | (EC2; | (EC2; | (EC2; |
| | μM) | μM) | μM) | μM) | μM) |
| Lactone mix ¹⁾ | 1.59 | 1.17 | 8.48 | 10.67 | 2.39 |
| Heptalactone gamma | 298.04 | inactive | inactive | inactive | inactive |
| Octalactone gamma | 26.93 | inactive | 101.73 | inactive | 65.20 |
| Nonalactone gamma | 2.83 | 11.34 | 11.14 | inactive | 12.85 |
| Decalactone gamma | 0.84 | 1.62 | 3.63 | 33.66 | 3.27 |
| Decalactone delta | 2.10 | 5.31 | 31.73 | inactive | 98.89 |
| Dodecalactone gamma | 0.85 | 0.48 | 5.31 | 1.31 | 1.41 |
| Dodecalactone delta | 2.59 | 1.11 | 31.38 | 15.76 | 35.12 |
| Methyl Tuberate Pure | 1.44 | 10.35 | 10.89 | 189.82 | 120.58 |
| Nectaryl | 2.32 | 1.12 | inactive | 19.72 | inactive |
| Undecalactone gamma | 0.28 | 0.34 | 2.11 | 6.53 | 0.71 |

¹⁾ An arbitrary molecular weight of 200 was assumed for the lactone mix
OR10A3 is a very sensitive receptor with a high efficacy, therefore here the EC10, concentration for 10-fold OR activation is indicated.

### Example 26: Screening Odorants with Cells Expressing Multiple Receptors

[0704] In order to screen for a specific odor description, some or all members of a given set of OR which was identified to be specific for a given odor description as shown in example 25 can be combined in a screening for new odorants or new odorant mixtures. The screening on the different OR can be performed sequentially or in parallel assays with the individual OR of the OR set. Additionally, some or all of the OR of the OR set specific for the odor-description can also be co-expressed in a single cell line. Thus, to screen for woody-ambery molecules, cells were either separately or simultaneously transfected with two plasmids coding for the optimized OR7A17 and OR7C1 both with the C-terminal domain of SEQ ID NO: 221. Cells were then stimulated with the ligand Iso E super, which is a specific ligand for OR7A17 and with Ambermax, which is a specific ligand for OR7C1. As shown in FIG. 26, cells solely expressing OR7A17 respond only to Iso E super, while cells expressing OR7C1 only respond to Ambermax. Cells expressing both receptors become functional sensors for the Ambery-woody odor description and detect both ligands down to low concentrations.

### Example 27. Determination of More Potent Ligand for OR10J5 among (S,E)-10-hydroxy-4,8-dimethyldec-4-enal or (R,E)-10-hydroxy-4,8-dimethyldec-4-enal

[0705] Activation of OR10J5 with the C-terminal domain of SEQ ID NO: 86 by (S,E)-10-hydroxy-4,8-dimethyldec-4-enal or (R,E)-10-hydroxy-4,8-dimethyldec-4-enal was measured in a dose-response analysis.

[0706] Potency of the two tested OR10J5 ligands is expressed as the EC20% value, which is the concentration that leads to a 20% increase of the luciferase activity relative to the positive control (100 μM, Mahonial; (4E)-9-hydroxy-5,9-dimethyl-4-Decenal). (S,E)-10-hydroxy-4,8-dimethyldec-4-enal has an EC20% value of 10.1 μM while (R,E)-10-hydroxy-4,8-dimethyldec-4-enal has an EC20% value of 24.4 μM. Because of the difference in EC20%, a much lower concentration of the (S,E)-isomer is needed to activate the receptor compared to the concentration needed of the (R,E)-isomer. FIG. 28 shows the response of both test compounds graphically. This example further illustrates the usefulness of the improved assay to determine the most odor-active isomers.

The application's sequence listing, which the Patent Office published only in electronic form, follows.

SEQUENCE LISTING (890 sequences)

SEQ ID NO: 1 - protein, 16 aa, synthetic construct
  source 1..16: note = C-terminal domain motif
  VARIANT 3: note = K or R
  VARIANT 4: note = E or D or Q
  VARIANT 5: note = V or M or I or L
  VARIANT 6: note = K or R
  VARIANT 7: note = can be any amino acid
  VARIANT 9: note = L or I or V
  VARIANT 10: note = K or R or H
  VARIANT 11: note = K or R
  VARIANT 13: note = L or I or F
  VARIANT 14: note = K or R or G
  VARIANT 15: note = K or R
  VARIANT 16: note = K or R
RNXXXXXAXXXJXXXX

SEQ ID NO: 2 - protein, 10 aa, synthetic construct
  source 1..10: note = motif overlapping TM III and IC II
MAYDRYVAIC

SEQ ID NO: 3 - protein, 7 aa, synthetic construct
  source 1..7: note = motif overlapping IC III and TM VI
FSTCSSH

SEQ ID NO: 4 - protein, 8 aa, synthetic construct
  source 1..8: note = motif in TM VII
PMLNPFIY

SEQ ID NO: 5 - protein, 16 aa, synthetic construct
  source 1..16: note = C-terminal domain motif
  VARIANT 3: note = K or R
  VARIANT 5: note = V or M or I
  VARIANT 6: note = K or R
  VARIANT 7: note = can be any amino acid
  VARIANT 9: note = L or I or V
  VARIANT 10: note = K or R
  VARIANT 11: note = K or R
  VARIANT 13: note = L or I or F
  VARIANT 14: note = K or R
  VARIANT 15: note = K or R
  VARIANT 16: note = K or R
RNXEXXXAXXXLXXXX

SEQ ID NO: 6 - protein, 16 aa, synthetic construct
  source 1..16: note = C-terminal domain motif
  VARIANT 3: note = K or R
  VARIANT 4: note = E or D or Q
  VARIANT 5: note = V or M or I or L
  VARIANT 6: note = K or R
  VARIANT 7: note = D or K or R or E or N or V or A or Q or G
  VARIANT 9: note = L or I or V
  VARIANT 10: note = K or R or H
  VARIANT 11: note = K or R
  VARIANT 13: note = L or I or F
  VARIANT 14: note = K or R or G
  VARIANT 15: note = K or R
  VARIANT 16: note = K or R
RNXXXXXAXXXJXXXX

SEQ ID NO: 7 - protein, 16 aa, synthetic construct
  source 1..16: note = C-terminal domain motif
  VARIANT 3: note = K or R
  VARIANT 4: note = E or D or Q
  VARIANT 5: note = V or M or I or L
  VARIANT 6: note = K or R
  VARIANT 7: note = D or K or R or E or N or V or A or Q
  VARIANT 9: note = L or I or V
  VARIANT 10: note = K or R or H
  VARIANT 11: note = K or R
  VARIANT 13: note = L or I or F
  VARIANT 14: note = K or R or G
  VARIANT 15: note = K or R
  VARIANT 16: note = K or R
RNXXXXXAXXXJXXXX

SEQ ID NO: 8 - protein, 16 aa, synthetic construct
  source 1..16: note = C-terminal domain motif
  VARIANT 3: note = K or R
  VARIANT 5: note = V or M or I
  VARIANT 6: note = K or R
  VARIANT 7: note = D or K or R or E or N or V or A or Q or G
  VARIANT 9: note = L or I or V
  VARIANT 10: note = K or R
  VARIANT 11: note = K or R
  VARIANT 13: note = L or I or F
  VARIANT 14: note = K or R
  VARIANT 15: note = K or R
  VARIANT 16: note = K or R
RNXEXXXAXXXLXXXX

SEQ ID NO: 9 - protein, 16 aa, synthetic construct
  source 1..16: note = C-terminal domain motif
  VARIANT 3: note = K or R
  VARIANT 5: note = V or M or I
  VARIANT 6: note = K or R
  VARIANT 7: note = D or K or R or E or N or V or A or Q
  VARIANT 9: note = L or I or V
  VARIANT 10: note = K or R
  VARIANT 11: note = K or R
  VARIANT 13: note = L or I or F
  VARIANT 14: note = K or R
  VARIANT 15: note = K or R
  VARIANT 16: note = K or R
RNXEXXXAXXXLXXXX

SEQ ID NO: 10 - protein, 16 aa, synthetic construct
  source 1..16: note = C-terminal domain sequence
RNKEVKDALKRLLKRK

SEQ ID NO: 11 - protein, 16 aa, synthetic construct
  source 1..16: note = C-terminal domain sequence
RNREVKDALKRLLKRK

SEQ ID NO: 12 - protein, 16 aa, synthetic construct
  source 1..16: note = C-terminal domain sequence
RNKEIKDALKRLLKRK

SEQ ID NO: 13 - protein, 16 aa, synthetic construct
  source 1..16: note = C-terminal domain sequence
RNKEMKDALKRLLKRK

SEQ ID NO: 14 - protein, 16 aa, synthetic construct
  source 1..16: note = C-terminal domain sequence
RNKEVRDALKRLLKRK

SEQ ID NO: 15 - protein, 16 aa, synthetic construct
  source 1..16: note = C-terminal domain sequence
RNKEVKKALKRLLKRK

SEQ ID NO: 16 - protein, 16 aa, synthetic construct
  source 1..16: note = C-terminal domain sequence
RNKEVKEALKRLLKRK

SEQ ID NO: 17 - protein, 16 aa, synthetic construct
  source 1..16: note = C-terminal domain sequence
RNKEVKNALKRLLKRK

SEQ ID NO: 18 - protein, 16 aa, synthetic construct
  source 1..16: note = C-terminal domain sequence
RNKEVKRALKRLLKRK

SEQ ID NO: 19 - protein, 16 aa, synthetic construct
  source 1..16: note = C-terminal domain sequence
RNKEVKVALKRLLKRK

SEQ ID NO: 20 - protein, 16 aa, synthetic construct
  source 1..16: note = C-terminal domain sequence
RNKEVKAALKRLLKRK

SEQ ID NO: 21 - protein, 16 aa, synthetic construct
  source 1..16: note = C-terminal domain sequence
RNKEVKQALKRLLKRK

SEQ ID NO: 22 - protein, 16 aa, synthetic construct
  source 1..16: note = C-terminal domain sequence
RNKEVKDAVKRLLKRK

SEQ ID NO: 23 - protein, 16 aa, synthetic construct
  source 1..16: note = C-terminal domain sequence
RNKEVKDAIKRLLKRK

SEQ ID NO: 24 - protein, 16 aa, synthetic construct
  source 1..16: note = C-terminal domain sequence
RNKEVKDALRRLLKRK

SEQ ID NO: 25 - protein, 16 aa, synthetic construct
  source 1..16: note = C-terminal domain sequence
RNKEVKDALKKLLKRK

SEQ ID NO: 26 - protein, 16 aa, synthetic construct
  source 1..16: note = C-terminal domain sequence
RNKEVKDALKRLIKRK

SEQ ID NO: 27 - protein, 16 aa, synthetic construct
  source 1..16: note = C-terminal domain sequence
RNKEVKDALKRLFKRK

SEQ ID NO: 28 - protein, 16 aa, synthetic construct
  source 1..16: note = C-terminal domain sequence
RNKEVKDALKRLLRRK

SEQ ID NO: 29 - protein, 16 aa, synthetic construct
  source 1..16: note = C-terminal domain sequence
RNKEVKDALKRLLKKK

SEQ ID NO: 30 - protein, 16 aa, synthetic construct
  source 1..16: note = C-terminal domain sequence
RNKEVKDALKRLLKRR

SEQ ID NO: 31 - protein, 16 aa, synthetic construct
  source 1..16: note = C-terminal domain sequence
RNKDVKDALKRLLKRK

SEQ ID NO: 32 - protein, 16 aa, synthetic construct
  source 1..16: note = C-terminal domain sequence
RNKQVKDALKRLLKRK

SEQ ID NO: 33 - protein, 16 aa, synthetic construct
  source 1..16: note = C-terminal domain sequence
RNKELKDALKRLLKRK

SEQ ID NO: 34 - protein, 16 aa, synthetic construct
  source 1..16: note = C-terminal domain sequence
RNKEVKGALKRLLKRK

SEQ ID NO: 35 - protein, 16 aa, synthetic construct
  source 1..16: note = C-terminal domain sequence
RNKEVKDALHRLLKRK

SEQ ID NO: 36 - protein, 16 aa, synthetic construct
  source 1..16: note = C-terminal domain sequence
RNKEVKDALKRILKRK

SEQ ID NO: 37 - protein, 16 aa, synthetic construct
  source 1..16: note = C-terminal domain sequence
RNKEVKDALKRLLGRK

SEQ ID NO: 38 - protein, 16 aa, synthetic construct
  source 1..16: note = C-terminal domain sequence
RNKEVKRAIKRLLKRK

SEQ ID NO: 39 - protein, 16 aa, synthetic construct
  source 1..16: note = C-terminal domain sequence
RNKEVKKAIKRLLKRK

SEQ ID NO: 40 - protein, 16 aa, synthetic construct
  source 1..16: note = C-terminal domain sequence
RNKEVKRAIKRLFKRK

SEQ ID NO: 41 - protein, 16 aa, synthetic construct
  source 1..16: note = C-terminal domain sequence
RNKEVKKAIKRLFKRK

SEQ ID NO: 42 - protein, 16 aa, synthetic construct
  source 1..16: note = C-terminal domain sequence
RNKEVKRAIRKLLKRK

SEQ ID NO: 43 - protein, 16 aa, synthetic construct
  source 1..16: note = C-terminal domain sequence
RNKEVKDALRKLLKRK

SEQ ID NO: 44 - protein, 16 aa, synthetic construct
  source 1..16: note = C-terminal domain sequence
RNKEVKDALKRLLRRR

SEQ ID NO: 45 - protein, 16 aa, synthetic construct
  source 1..16: note = C-terminal domain sequence
RNKEVKRALKRLLRRR

SEQ ID NO: 46 - protein, 16 aa, synthetic construct
  source 1..16: note = C-terminal domain sequence
RNKEVKKALKRLLRRR

SEQ ID NO: 47 - protein, 16 aa, synthetic construct
  source 1..16: note = C-terminal domain sequence
RNREVKRAIKRLLKRK

SEQ ID NO: 48 - protein, 16 aa, synthetic construct
  source 1..16: note = C-terminal domain sequence
RNREVKKAIKRLLKRK

SEQ ID NO: 49 - protein, 16 aa, synthetic construct
  source 1..16: note = C-terminal domain sequence
RNREVKRAIKRLFKRK

SEQ ID NO: 50 - protein, 16 aa, synthetic construct
  source 1..16: note = C-terminal domain sequence
RNREVKKAIKRLFKRK

SEQ ID NO: 51 - protein, 16 aa, synthetic construct
  source 1..16: note = C-terminal domain sequence
RNREVKRAIRKLLKRK

SEQ ID NO: 52 - protein, 16 aa, synthetic construct
  source 1..16: note = C-terminal domain sequence
RNREVKDALRKLLKRK

SEQ ID NO: 53 - protein, 16 aa, synthetic construct
  source 1..16: note = C-terminal domain sequence
RNREVKDALKRLLRRR

SEQ ID NO: 54 - protein, 16 aa, synthetic construct
  source 1..16: note = C-terminal domain sequence
RNKEVKKAIKRLLRRK

SEQ ID NO: 55 - protein, 16 aa, synthetic construct
  source 1..16: note = C-terminal domain sequence
RNKEVKKAIKRLLKKK

SEQ ID NO: 56 - protein, 16 aa, synthetic construct
  source 1..16: note = C-terminal domain sequence
RNKEVKKAIKRLLKRR

SEQ ID NO: 57 - protein, 16 aa, synthetic construct
  source 1..16: note = C-terminal domain sequence
RNKEVKRAIKRLLRRK

SEQ ID NO: 58 - protein, 16 aa, synthetic construct
  source 1..16: note = C-terminal domain sequence
RNKEVKRAIKRLLKKK

SEQ ID NO: 59 - protein, 16 aa, synthetic construct
  source 1..16: note = C-terminal domain sequence
RNKEVKRAIKRLLKRR

SEQ ID NO: 60 - protein, 16 aa, synthetic construct
  source 1..16: note = C-terminal domain sequence
RNKEVKKAIKRLFRRK

SEQ ID NO: 61 - protein, 16 aa, synthetic construct
  source 1..16: note = C-terminal domain sequence
RNKEVKKAIKRLFKKK

SEQ ID NO: 62 - protein, 16 aa, synthetic construct
  source 1..16: note = C-terminal domain sequence
RNKEVKKAIKRLFKRR

SEQ ID NO: 63 - protein, 16 aa, synthetic construct
  source 1..16: note = C-terminal domain sequence
RNKEVKRAIKRLFRRK

SEQ ID NO: 64 - protein, 16 aa, synthetic construct
  source 1..16: note = C-terminal domain sequence
RNKEVKRAIKRLFKKK

SEQ ID NO: 65 - protein, 16 aa, synthetic construct
  source 1..16: note = C-terminal domain sequence
RNKEVKRAIKRLFKRR

SEQ ID NO: 66 - protein, 16 aa, synthetic construct
  source 1..16: note = C-terminal domain sequence
RNREVKRAIKRLLRKK

SEQ ID NO: 67 - protein, 16 aa, synthetic construct
  source 1..16: note = C-terminal domain sequence
RNREVKKAIKRLLRKK

SEQ ID NO: 68 - protein, 16 aa, synthetic construct
  source 1..16: note = C-terminal domain sequence
RNREVKRAIKRLFRRR

SEQ ID NO: 69 - protein, 16 aa, synthetic construct
  source 1..16: note = C-terminal domain sequence
RNREVKKAIKRLFRRR

SEQ ID NO: 70 - protein, 16 aa, synthetic construct
  source 1..16: note = C-terminal domain sequence
RNREVKKAIKRLFRRK

SEQ ID NO: 71 - protein, 16 aa, synthetic construct
  source 1..16: note = C-terminal domain sequence
RNREVKKAIKRLFKKK

SEQ ID NO: 72 - protein, 16 aa, synthetic construct
  source 1..16: note = C-terminal domain sequence
RNREVKKAIKRLFKRR

SEQ ID NO: 73 - protein, 16 aa, synthetic construct
  source 1..16: note = C-terminal domain sequence
RNREVKRAIKRLFRRK

SEQ ID NO: 74 - protein, 16 aa, synthetic construct
  source 1..16: note = C-terminal domain sequence
RNREVKRAIKRLFKKK

SEQ ID NO: 75 - protein, 16 aa, synthetic construct
  source 1..16: note = C-terminal domain sequence
RNREVKRAIKRLFKRR

SEQ ID NO: 76 - protein, 17 aa, Homo sapiens
  source 1..17: note = Homo sapiens LUCY-tag
MRPQILLLLALLTLGLA

SEQ ID NO: 77 - protein, 17 aa, Mus musculus
  source 1..17: note = Mus musculus LUCY-tag
MSHQILLLLALLTLGLA

SEQ ID NO: 78 - protein, 9 aa, synthetic construct
  source 1..9: note = FLAG-tag
MDYKDDDDK

SEQ ID NO: 79 - protein, 20 aa, synthetic construct
  source 1..20: note = rho-tag
MNGTEGPNFYVPFSNKTGVV

SEQ ID NO: 80 - DNA, 150 bp, synthetic construct
  source 1..150: mol_type = other DNA; note = mmLucy-FLAG-rho
atgagccaccagatcctgctgctcctggccctgctgaccctaggcctggctgattacaaggacgacgacgataagatcgaattgatgaacgggaccgagggcccaaacttctacgtgcctttctccaacaagacgggcgtggtggaattc

SEQ ID NO: 81 - protein, 50 aa, synthetic construct
  source 1..50: note = mmLucy-FLAG-rho
MSHQILLLLALLTLGLADYKDDDDKIELMNGTEGPNFYVPFSNKTGVVEF

SEQ ID NO: 82 - DNA, 588 bp, synthetic construct
  source 1..588: mol_type = other DNA; note = CMV promoter
gttgacattgattattgactagttattaatagtaatcaattacggggtcattagttcatagcccatatatggagttccgcgttacataacttacggtaaatggcccgcctggctgaccgcccaacgacccccgcccattgacgtcaataatgacgtatgttcccatagtaacgccaatagggactttccattgacgtcaatgggtggagtatttacggtaaactgcccacttggcagtacatcaagtgtatcatatgccaagtacgccccctattgacgtcaatgacggtaaatggcccgcctggcattatgcccagtacatgaccttatgggactttcctacttggcagtacatctacgtattagtcatcgctattaccatggtgatgcggttttggcagtacatcaatgggcgtggatagcggtttgactcacggggatttccaagtctccaccccattgacgtcaatgggagtttgttttggcaccaaaatcaacgggactttccaaaatgtcgtaacaactccgccccattgacgcaaatgggcggtaggcgtgtacggtgggaggtctatataagcagagctc

SEQ ID NO: 83 - DNA, 225 bp, synthetic construct
  source 1..225: mol_type = other DNA; note = bgh terminator
ctgtgccttctagttgccagccatctgttgtttgcccctcccccgtgccttccttgaccctggaaggtgccactcccactgtcctttcctaataaaatgaggaaattgcatcgcattgtctgagtaggtgtcattctattctggggggtggggtggggcaggacagcaagggggaggattgggaagacaatagcaggcatgctggggatgcggtgggctctatgg

SEQ ID NO: 84 - protein, 227 aa, synthetic construct
  source 1..227: note = RTP1S  V227I
MCKSVTTDEWKKVFYEKMEEAKPADSWDLIIDPNLKHNVLSPGWKQYLELHASGRFHCSWCWHTWQSPYVVILFHMFLDRAQRAGSVRMRVFKQLCYECGTARLDESSMLEENIEGLVDNLITSLREQCYGERGGQYRIHVASRQDNRRHRGEFCEACQEGIVHWKPSEKLLEEEATTYTFSRAPSPTKSQDQTGSGWNFCSIPWCLFWATVLLLIIYLQFSFRSSI

SEQ ID NO: 85 - protein, 225 aa, synthetic construct
  source 1..225: note = RTP2  L220R
MCTSLTTCEWKKVFYEKMEVAKPADSWELIIDPNLKPSELAPGWKQYLEQHASGRFHCSWCWHTWQSAHVVILFHMFLDRAQRAGSVRMRVFKQLCYECGTARLDESSMLEENIEGLVDNLITSLREQCYEEDGGQYRIHVASRPDSGPHRAEFCEACQEGIVHWKPSEKLLEEEVTTYTSEASKPRAQAGSGYNFLSLRWCLFWASLCLLVVYLQFSFRSPAFF

SEQ ID NO: 86 - protein, 18 aa, synthetic construct
  source 1..18: note = C-terminal domain sequence
RNKEVKDALKRLLKRKCC

SEQ ID NO: 87 - protein, 18 aa, synthetic construct
  source 1..18: note = C-terminal domain sequence
RNREVKDALKRLLKRKCC

SEQ ID NO: 88 - protein, 18 aa, synthetic construct
  source 1..18: note = C-terminal domain sequence
RNKEIKDALKRLLKRKCC

SEQ ID NO: 89 - protein, 18 aa, synthetic construct
  source 1..18: note = C-terminal domain sequence
RNKEMKDALKRLLKRKCC

SEQ ID NO: 90 - protein, 18 aa, synthetic construct
  source 1..18: note = C-terminal domain sequence
RNKEVRDALKRLLKRKCC

SEQ ID NO: 91 - protein, 18 aa, synthetic construct
  source 1..18: note = C-terminal domain sequence
RNKEVKKALKRLLKRKCC

SEQ ID NO: 92 - protein, 18 aa, synthetic construct
  source 1..18: note = C-terminal domain sequence
RNKEVKEALKRLLKRKCC

SEQ ID NO: 93 - protein, 18 aa, synthetic construct
  source 1..18: note = C-terminal domain sequence
RNKEVKNALKRLLKRKCC

SEQ ID NO: 94 - protein, 18 aa, synthetic construct
  source 1..18: note = C-terminal domain sequence
RNKEVKRALKRLLKRKCC

SEQ ID NO: 95 - protein, 18 aa, synthetic construct
  source 1..18: note = C-terminal domain sequence
RNKEVKVALKRLLKRKCC

SEQ ID NO: 96 - protein, 18 aa, synthetic construct
  source 1..18: note = C-terminal domain sequence
RNKEVKAALKRLLKRKCC

SEQ ID NO: 97 - protein, 18 aa, synthetic construct
  source 1..18: note = C-terminal domain sequence
RNKEVKQALKRLLKRKCC

SEQ ID NO: 98 - protein, 18 aa, synthetic construct
  source 1..18: note = C-terminal domain sequence
RNKEVKDAVKRLLKRKCC

SEQ ID NO: 99 - protein, 18 aa, synthetic construct
  source 1..18: note = C-terminal domain sequence
RNKEVKDAIKRLLKRKCC

SEQ ID NO: 100 - protein, 18 aa, synthetic construct
  source 1..18: note = C-terminal domain sequence
RNKEVKDALRRLLKRKCC

SEQ ID NO: 101 - protein, 18 aa, synthetic construct
  source 1..18: note = C-terminal domain sequence
RNKEVKDALKKLLKRKCC

SEQ ID NO: 102 - protein, 18 aa, synthetic construct
  source 1..18: note = C-terminal domain sequence
RNKEVKDALKRLIKRKCC

SEQ ID NO: 103 - protein, 18 aa, synthetic construct
  source 1..18: note = C-terminal domain sequence
RNKEVKDALKRLFKRKCC

SEQ ID NO: 104 - protein, 18 aa, synthetic construct
  source 1..18: note = C-terminal domain sequence
RNKEVKDALKRLLRRKCC

SEQ ID NO: 105 - protein, 18 aa, synthetic construct
  source 1..18: note = C-terminal domain sequence
RNKEVKDALKRLLKKKCC

SEQ ID NO: 106 - protein, 18 aa, synthetic construct
  source 1..18: note = C-terminal domain sequence
RNKEVKDALKRLLKRRCC

SEQ ID NO: 107 - protein, 18 aa, synthetic construct
  source 1..18: note = C-terminal domain sequence
RNKDVKDALKRLLKRKCC

SEQ ID NO: 108 - protein, 18 aa, synthetic construct
  source 1..18: note = C-terminal domain sequence
RNKQVKDALKRLLKRKCC

SEQ ID NO: 109 - protein, 18 aa, synthetic construct
  source 1..18: note = C-terminal domain sequence
RNKELKDALKRLLKRKCC

SEQ ID NO: 110 - protein, 18 aa, synthetic construct
  source 1..18: note = C-terminal domain sequence
RNKEVKGALKRLLKRKCC

SEQ ID NO: 111 - protein, 18 aa, synthetic construct
  source 1..18: note = C-terminal domain sequence
RNKEVKDALHRLLKRKCC

SEQ ID NO: 112 - protein, 18 aa, synthetic construct
  source 1..18: note = C-terminal domain sequence
RNKEVKDALKRILKRKCC

SEQ ID NO: 113 - protein, 18 aa, synthetic construct
  source 1..18: note = C-terminal domain sequence
RNKEVKDALKRLLGRKCC

SEQ ID NO: 114 - protein, 18 aa, synthetic construct
  source 1..18: note = C-terminal domain sequence
RNKEVKRAIKRLLKRKCC

SEQ ID NO: 115 - protein, 18 aa, synthetic construct
  source 1..18: note = C-terminal domain sequence
RNKEVKKAIKRLLKRKCC

SEQ ID NO: 116 - protein, 18 aa, synthetic construct
  source 1..18: note = C-terminal domain sequence
RNKEVKRAIKRLFKRKCC

SEQ ID NO: 117 - protein, 18 aa, synthetic construct
  source 1..18: note = C-terminal domain sequence
RNKEVKKAIKRLFKRKCC

SEQ ID NO: 118 - protein, 18 aa, synthetic construct
  source 1..18: note = C-terminal domain sequence
RNKEVKRAIRKLLKRKCC

SEQ ID NO: 119 - protein, 18 aa, synthetic construct
  source 1..18: note = C-terminal domain sequence
RNKEVKDALRKLLKRKCC

SEQ ID NO: 120 - protein, 18 aa, synthetic construct
  source 1..18: note = C-terminal domain sequence
RNKEVKDALKRLLRRRCC

SEQ ID NO: 121 - protein, 18 aa, synthetic construct
  source 1..18: note = C-terminal domain sequence
RNKEVKRAIKRLLKRKCR

SEQ ID NO: 122 - protein, 18 aa, synthetic construct
  source 1..18: note = C-terminal domain sequence
RNKEVKKAIKRLLKRKCR

SEQ ID NO: 123 - protein, 18 aa, synthetic construct
  source 1..18: note = C-terminal domain sequence
RNKEVKRALKRLLKRKRR

SEQ ID NO: 124 - protein, 18 aa, synthetic construct
  source 1..18: note = C-terminal domain sequence
RNKEVKRALKRLLKRKYP

SEQ ID NO: 125 - protein, 18 aa, synthetic construct
  source 1..18: note = C-terminal domain sequence
RNKEVKRALKRLLKRKRF

SEQ ID NO: 126 - protein, 18 aa, synthetic construct
  source 1..18: note = C-terminal domain sequence
RNKEVKRALKRLLKRKFK

SEQ ID NO: 127 - protein, 18 aa, synthetic construct
  source 1..18: note = C-terminal domain sequence
RNKEVKKALKRLLKRKRR

SEQ ID NO: 128 - protein, 18 aa, synthetic construct
  source 1..18: note = C-terminal domain sequence
RNKEVKKALKRLLKRKYP

SEQ ID NO: 129 - protein, 18 aa, synthetic construct
  source 1..18: note = C-terminal domain sequence
RNKEVKKALKRLLKRKRF

SEQ ID NO: 130 - protein, 18 aa, synthetic construct
  source 1..18: note = C-terminal domain sequence
RNKEVKKALKRLLKRKFK

SEQ ID NO: 131-132 - skipped (2 entries)

SEQ ID NO: 133 - protein, 19 aa, synthetic construct
  source 1..19: note = C-terminal domain sequence
RNKEVKDALKRLLKRKCRR

SEQ ID NO: 134 - protein, 19 aa, synthetic construct
  source 1..19: note = C-terminal domain sequence
RNKEVKDALKRLLKRKCCC

SEQ ID NO: 135 - protein, 19 aa, synthetic construct
  source 1..19: note = C-terminal domain sequence
RNKEVKDALKRLLKRKCCF

SEQ ID NO: 136 - protein, 19 aa, synthetic construct
  source 1..19: note = C-terminal domain sequence
RNKEVKDALKRLLKRKCCL

SEQ ID NO: 137 - protein, 19 aa, synthetic construct
  source 1..19: note = C-terminal domain sequence
RNKEVKDALKRLLKRKCCM

SEQ ID NO: 138 - protein, 19 aa, synthetic construct
  source 1..19: note = C-terminal domain sequence
RNKEVKDALKRLLKRKCCS

SEQ ID NO: 139 - protein, 19 aa, synthetic construct
  source 1..19: note = C-terminal domain sequence
RNKEVKDALKRLLKRKCCP

SEQ ID NO: 140 - protein, 19 aa, synthetic construct
  source 1..19: note = C-terminal domain sequence
RNKEVKDALKRLLKRKCCA

SEQ ID NO: 141 - protein, 19 aa, synthetic construct
  source 1..19: note = C-terminal domain sequence
RNKEVKDALKRLLKRKCCY

SEQ ID NO: 142 - protein, 19 aa, synthetic construct
  source 1..19: note = C-terminal domain sequence
RNKEVKDALKRLLKRKCCH

SEQ ID NO: 143 - protein, 19 aa, synthetic construct
  source 1..19: note = C-terminal domain sequence
RNKEVKDALKRLLKRKCCN

SEQ ID NO: 144 - protein, 19 aa, synthetic construct
  source 1..19: note = C-terminal domain sequence
RNKEVKDALKRLLKRKCCD

SEQ ID NO: 145 - protein, 19 aa, synthetic construct
  source 1..19: note = C-terminal domain sequence
RNKEVKDALKRLLKRKCCK

SEQ ID NO: 146 - protein, 19 aa, synthetic construct
  source 1..19: note = C-terminal domain sequence
RNKEVKDALKRLLKRKCCR

SEQ ID NO: 147 - protein, 19 aa, synthetic construct
  source 1..19: note = C-terminal domain sequence
RNKEVKDALKRLLKRKCCG

SEQ ID NO: 148 - skipped

SEQ ID NO: 149 - protein, 20 aa, synthetic construct
  source 1..20: note = C-terminal domain sequence
RNKEVKDALKRLLKRKCRRR

SEQ ID NO: 150 - protein, 20 aa, synthetic construct
  source 1..20: note = C-terminal domain sequence
RNKEVKDALKRLLKRKCRKK

SEQ ID NO: 151 - protein, 20 aa, synthetic construct
  source 1..20: note = C-terminal domain sequence
RNKEVKDALKRLLKRKCCRR

SEQ ID NO: 152-153 - skipped (2 entries)

SEQ ID NO: 154 - protein, 21 aa, synthetic construct
  source 1..21: note = C-terminal domain sequence
RNKEVKDALKRLLKRKCRRRR

SEQ ID NO: 155 - skipped

SEQ ID NO: 156 - protein, 21 aa, synthetic construct
  source 1..21: note = C-terminal domain sequence
RNKEVKDALKRLLKRKCCRRR

SEQ ID NO: 157 - protein, 22 aa, synthetic construct
  source 1..22: note = C-terminal domain sequence
RNKEVKDALKRLLKRKCRRRRR

SEQ ID NO: 158 - protein, 22 aa, synthetic construct
  source 1..22: note = C-terminal domain sequence
RNKEVKDALKRLLKRKCRRRKK

SEQ ID NO: 159 - protein, 4 aa, synthetic construct
  source 1..4: note = additional residues
CRRR

SEQ ID NO: 160 - protein, 4 aa, synthetic construct
  source 1..4: note = additional residues
CRKK

SEQ ID NO: 161 - protein, 4 aa, synthetic construct
  source 1..4: note = additional residues
CCRR

SEQ ID NO: 162 - protein, 5 aa, synthetic construct
  source 1..5: note = additional residues
CRRRR

SEQ ID NO: 163 - protein, 5 aa, synthetic construct
  source 1..5: note = additional residues
CCRRR

SEQ ID NO: 164 - protein, 6 aa, synthetic construct
  source 1..6: note = additional residues
CRRRRR

SEQ ID NO: 165 - protein, 6 aa, synthetic construct
  source 1..6: note = additional residues
CRRRKK

SEQ ID NO: 166 - protein, 16 aa, synthetic construct
  source 1..16: note = C-terminal domain sequence
  VARIANT 3: note = K or R
  VARIANT 4: note = E or D or Q
  VARIANT 5: note = V or M or I or L
  VARIANT 6: note = K or R
  VARIANT 7: note = D or K or R
  VARIANT 9: note = L or I or V
  VARIANT 10: note = K or R or H
  VARIANT 11: note = K or R
  VARIANT 13: note = L or I or F
  VARIANT 14: note = K or R or G
  VARIANT 15: note = K or R
  VARIANT 16: note = K or R
RNXXXXXAXXXJXXXX

SEQ ID NO: 167 - protein, 16 aa, synthetic construct
  source 1..16: note = C-terminal domain sequence
  VARIANT 3: note = K or R
  VARIANT 5: note = V or M or I
  VARIANT 6: note = K or R
  VARIANT 7: note = D or K or R
  VARIANT 9: note = L or I or V
  VARIANT 10: note = K or R
  VARIANT 11: note = K or R
  VARIANT 13: note = L or I or F
  VARIANT 14: note = K or R
  VARIANT 15: note = K or R
  VARIANT 16: note = K or R
RNXEXXXAXXXLXXXX

SEQ ID NO: 168 - protein, 310 aa, synthetic construct
  source 1..310: note = OR7C1 modified sequence
METGNQTHAQEFLLLGFSATSEIQFILFGLFLSMYLVTFTGNLLIILAICSDSHLHTPMYFFLSNLSFADLCFTSTTVPKMLLNILTQNKFITYAGCLSQIFFFTSFGCLDNLLLTVMAYDRFVAICHPLHYTVIMNPQLCGLLVLGSWCISVMGSLLETLTVLRLSFCTEMEIPHFFCDLLEVLKLACSDTFINNVVIYFATGVLGVISFTGIFFSYYKIVFSILRISSAGRKHKAFSTCGSHLSVVTLFYGTGFGVYLSSAATPSSRTSLVASVMYTMVTPMLNPFIYSLRNKEVKDALKRLLKRKCC

SEQ ID NO: 169 - protein, 310 aa, synthetic construct
  source 1..310: note = OR9Q2 modified sequence
MAERNYTVVTEFFLTAFTEHLQWRVPLFLIFLSFYLATMLGNTGMILLIRGDRRLHTPMYFFLSHLSLVDICYSSAIIPQMLAVLWEHGTTISQARCAAQFFLFTFFASIDCYLLAIMAYDRYTAVCQPLLYVTIITEKARWGLVTGAYVAGFFSAFVRTVTAFTLSFCGNNEINFIFCDLPPLLKLSCGDSYTQEVVIIVFALFVMPACILVILVSYLFIIVAILQIHSAGGRAKTFSTCASHLTAVALFFGTLIFMYLRDNTGQSSEGDRVVSVLYTVVTPMLNPLIYSLRNKEVKDALKRLLKRKCC

SEQ ID NO: 170 - protein, 309 aa, synthetic construct
  source 1..309: note = OR8K3 modified sequence
MEQHNLTTVNEFILTGITDIAELQAPLFALFLMIYVISVMGNLGMIVLTKLDSRLQTPMYFFLRHLAFMDLGYSTTVGPKMLVNFVVDKNIISYYFCATQLAFFLVFIGSELFILSAMSYDRYVAICNPLLYTVIMSRRVCQVLVAIPYLYCTFISLLVTIKIFTLSFCGYNVISHFYCDSLPLLPLLCSNTHEIELIILIFAAIDLISSLLIVLLSYLLILVAILRMNSAGRQKAFSTCGAHLTVVIVFYGTLLFMYVQPKSSHSFDTDKVASIFYTLVIPMLNPLIYSLRNKEVKDALKRLLKRKCC

SEQ ID NO: 171 - protein, 309 aa, synthetic construct
  source 1..309: note = OR10J5 modified sequence
MKRKNFTEVSEFIFLGFSSFGKHQITLFVVFLTVYILTLVANIIIVTIICIDHHLHTPMYFFLSMLASSETVYTLVIVPRMLLSLIFHNQPISLAGCATQMFFFVILATNNCFLLTAMGYDRYVAICRPLRYTVIMSKGLCAQLVCGSFGIGLTMAVLHVTAMFNLPFCGTVVDHFFCDIYPVMKLSCIDTTINEIINYGVSSFVIFVPIGLIFISYVLVISSILQIASAEGRKKTFATCVSHLTVVIVHCGCASIAYLKPKSESSIEKDLVLSVTYTIITPLLNPVVYSLRNKEVKDALKRLLKRKCC

SEQ ID NO: 172 - protein, 310 aa, synthetic construct
  source 1..310: note = OR1C1 modified sequence
MEKRNLTVVREFVLLGLPSSAEQQHLLSVLFLCMYLATTLGNMLIIATIGFDSHLHSPMYFFLSNLAFVDICFTSTTVPQMVVNILTGTKTISFAGCLTQLFFFVSFVNMDSLLLCVMAYDRYVAICHPLHYTARMNLCLCVQLVAGLWLVTYLHALLHTVLIAQLSFCASNIIHHFFCDLNPLLQLSCSDVSFNVMIIFAVGGLLALTPLVCILVSYGLIFSTVLKITSTQGKQRAVSTCSCHLSVVVLFYGTAIAVYFSPSSPHMPESDTLSTIMYSMVAPMLNPFIYTLRNKEVKDALKRLLKRKCC

SEQ ID NO: 173 - protein, 310 aa, synthetic construct
  source 1..310: note = OR7D4 modified sequence
MEAENLTELSKFLLLGLSDDPELQPVLFGLFLSMYLVTVLGNLLIILAVSSDSHLHTPMYFFLSNLSFVDICFISTTVPKMLVSIQARSKDISYMGCLTQVYFLMMFAGMDTFLLAVMAYDRFVAICHPLHYTVIMNPCLCGLLVLASWFIIFWFSLVHILLMKRLTFSTGTEIPHFFCEPAQVLKVACSNTLLNNIVLYVATALLGVFPVAGILFSYSQIVSSLMGMSSTKGKYKAFSTCGSHLCVVSLFYGTGLGVYLSSAVTHSSQSSSTASVMYAMVTPMLNPFIYSLRNKEVKDALKRLLKRKCC

SEQ ID NO: 174 - protein, 308 aa, synthetic construct
  source 1..308: note = OR2T4 modified sequence
MANHTGWSDFILLGLFRQSKHPALLCVVIFVVFLMALSGNAVLILLIHCDAHLHTPMYFFISQLSLMDMAYISVTVPKMLLDQVMGVNKISAPECGMQMFFYVTLAGSEFFLLATMAYDRYVAICHPLRYPVLMNHRVCLFLSSGCWFLGSVDGFTFTPITMTFPFRGSREIHHFFCEVPAVLNLSCSDTSLYEIFMYLCCVLMLLIPVVIISSSYLLILLTIHGMNSAEGRKKAFATCSSHLTVVILFYGAAIYTYMLPSSYHTPEKDMMVSVFYTILTPVVNPLIYSLRNKEVKDALKRLLKRKCC

SEQ ID NO: 175 - protein, 308 aa, synthetic construct
  source 1..308: note = OR5B12 modified sequence
MENNTEVTEFILVGLTDDPELQIPLFIVFLFIYLITLVGNLGMIELILLDSCLHTPMYFFLSNLSLVDFGYSSAVTPKVMVGFLTGDKFILYNACATQFFFFVAFITAESFLLASMAYDRYAALCKPLHYTTTMTTNVCARLAIGSYICGFLNASIHTGNTFRLSFCRSNVVEHFFCDAPPLLTLSCSDNYISEMVIFFVVGFNDLFSILVILISYLFIFITIMKMRSPEGRQKAFSTCASHLTAVSIFYGTGIFMYLRPNSSHFMGTDKMASVFYAIVIPMLNPLVYSLRNKEVKDALKRLLKRKCC

SEQ ID NO: 176 - protein, 310 aa, synthetic construct
  source 1..310: note = OR7A17 modified sequence
MEPENDTGISEFVLLGLSEEPELQPFLFGLFLSMYLVTVLGNLLIILATISDSHLHTPMYFFLSNLSFADICFISTTIPKMLINIQTQSRVITYAGCITQMCFFVLFGGLDSLLLAVMAYDRFVAICHPLHYTVIMNPRLCGLLVLASWMIAALNSLSQSLMVLWLSFCTDLEIPHFFCELNQVIHLACSDTFLNDMGMYFAAGLLAGGPLVGILCSYSKIVSSIRAISSAQGKYKAFSTCASHLSVVSLFCCTGLGVYLTSAATHNSHTSATASVMYTVATPMLNPFIYSLRNKEVKDALKRLLKRKCC

SEQ ID NO: 177 - protein, 311 aa, synthetic construct
  source 1..311: note = OR10H5 modified sequence
MQGLNHTSVSEFILVGFSAFPHLQLMLFLLFLLMYLFTLLGNLLIMATVWSERSLHMPMYLFLCALSITEILYTVAIIPRMLADLLSTQRSIAFLACASQMFFSFSFGFTHSFLLTVMGYDRYVAICHPLRYNVLMSLRGCTCRVGCSWAGGLVMGMVVTSAIFHLAFCGHKEIHHFFCHVPPLLKLACGDDVLVVAKGVGLVCITALLGCFLLILLSYAFIVAAILKIPSAEGRNKAFSTCASHLTVVVVHYGFASVIYLKPKGPQSPEGDTLMGITYTVLTPFLSPIIFSLRNKEVKDALKRLLKRKCC

SEQ ID NO: 178 - protein, 315 aa, synthetic construct
  source 1..315: note = OR52A5 modified sequence
MPTFNGSVFMPSAFILIGIPGLESVQCWIGIPFSAMYLIGVIGNSLILVIIKYENSLHIPMYIFLAMLAATDIALNTCILPKMLGIFWFHLPEISFDACLFQMWLIHSFQAIESGILLAMALDRYVAICIPLRHATIFSQQFLTHIGLGVTLRAAILIIPSLGLIKCCLKHYRTTVISHSYCEHMAIVKLATEDIRVNKIYGLFVAFAILGFDIIFITLSYVQIFITVFQLPQKEARFKAFNTCIAHICVFLQFYLLAFFSFFTHRFGSHIPPYIHILLSNLYLLVPPFLNPIVYGVRNKEVKDALKRLLKRKCC

SEQ ID NO: 179 - protein, 311 aa, synthetic construct
  source 1..311: note = OR5A2 modified sequence
MAVGRNNTIVTKFILLGLSDHPQMKIFLFMLFLGLYLLTLAWNLSLIALIKMDSHLHMPMYFFLSNLSFLDICYVSSTAPKMLSDIITEQKTISFVGCATQYFVFCGMGLTECFLLAAMAYDRYAAICNPLLYTVLISHTLCLKMVVGAYVGGFLSSFIETYSVYQHDFCGPYMINHFFCDLPPVLALSCSDTFTSEVVTFIVSVVVGIVSVLVVLISYGYIVAAVVKISSATGRTKAFSTCASHLTAVTLFYGSGFFMYMRPSSSYSLNRDKVVSIFYALVIPVVNPIIYSFRNKEVKDALKRLLKRKCC

SEQ ID NO: 180 - protein, 313 aa, synthetic construct
  source 1..313: note = OR1N2 modified sequence
MGKPGRVNQTTVSDFLLLGLSERPEEQPLLFGIFLGMYLVTMVGNLLIILAISSDPHLHTPMYFFLANLSLTDACFTSASIPKMLANIHTQSQIISYSGCLAQLYFLLMFGGLDNCLLAVMAYDRYVAICQPLHYSTSMSPQLCALMLGVCWVLTNCPALMHTLLLTRVAFCAQKAIPHFYCDPSALLKLACSDTHVNELMIITMGLLFLTVPLLLIVFSYVRIFWAVFGISSPGGRWKAFSTCGSHLTVVLLFYGSLMGVYLLPPSTYSTERESRAAVLYMVIIPMLNPFIYSLRNKEVKDALKRLLKRKCC

SEQ ID NO: 181 - protein, 313 aa, synthetic construct
  source 1..313: note = OR52E8 modified sequence
MSTSNHTQFHPSSFLLLGIPGLEDVHIWIGVPFFFVYLVALLGNTALLFVIQTEQSLHEPMYYFLAMLDSIDLGLSTATIPKMLGIFWFNTKEISFGGCLSHMFFIHFFTAMESIVLVAMAFDRYIAICKPLRYTMILTSKIISLIAGIAVLRSLYMVVPLVFLLLRLPFCGHRIIPHTYCEHMGIARLACASIKVNIRFGLGNISLLLLDVILIILSYVRILYAVFCLPSWEARLKALNTCGSHIGVILAFFTPAFFSFLTHRFGHNIPQYIHIILANLYVVVPPALNPVIYGVRNKEVKDALKRLLKRKCC

SEQ ID NO: 182 - protein, 315 aa, synthetic construct
  source 1..315: note = OR56A4 modified sequence
MASPSNDSTAPVSEFLLICFPNFQSWQHWLSLPLSLLFLLAMGANTTLLITIQLEASLHQPLYYLLSLLSLLDIVLCLTVIPKVLAIFWFDLRSISFPACFLQMFIMNSFLTMESCTFMVMAYDRYVAICHPLRYPSIITDQFVARAVVFVIARNAFVSLPVPMLSARLRYCAGNIIKNCICSNLSVSKLSCDDITFNQLYQFVAGWTLLGSDLILIVISYSFILKVVLRIKAEGAVAKALSTCGSHFILILFFSTVLLVLVITNLARKRIPPDVPILLNILHHLIPPALNPIVYGVRNKEVKDALKRLLKRKCC

SEQ ID NO: 183 - protein, 310 aa, synthetic construct
  source 1..310: note = OR2C1 modified sequence
MDGVNDSSLQGFVLMGISDHPQLEMIFFIAILFSYLLTLLGNSTIILLSRLEARLHTPMYFFLSNLSSLDLAFATSSVPQMLINLWGPGKTISYGGCITQLYVFLWLGATECILLVVMAFDRYVAVCRPLRYTAIMNPQLCWLLAVIACLGGLGNSVIQSTFTLQLPLCGHRRVEGFLCEVPAMIKLACGDTSLNQAVLNGVCTFFTAVPLSIIVISYCLIAQAVLKIRSAEGRRKAFNTCLSHLLVVFLFYGSASYGYLLPAKNSKQDQGKFISLFYSLVTPMVNPLIYTLRNKEVKDALKRLLKRKCC

SEQ ID NO: 184 - protein, 307 aa, synthetic construct
  source 1..307: note = OR2T11 modified sequence
MTNTSSSDFTLLGLLVNSEAAGIVFTVILAVFLGAVTANLVMIFLIQVDSRLHTPMYFLLSQLSIMDTLFICTTVPKLLADMVSKEKIISFVACGIQIFLYLTMIGSEFFLLGLMAYDRYVAVCNPLRYPVLMNRKKCLLLAAGAWFGGSLDGFLLTPITMNVPYCGSRSINHFFCEIPAVLKLACADTSLYETLMYICCVLMLLIPISIISTSYSLILLTIHRMPSAEGRKKAFTTCSSHLTVVSIFYGAAFYTYVLPQSFHTPEQDKVVSAFYTIVTPMLNPLIYSLRNKEVKDALKRLLKRKCC

SEQ ID NO: 185 - protein, 305 aa, synthetic construct
  source 1..305: note = OR4S2 modified sequence
MEKINNVTEFIFWGLSQSPEIEKVCFVVFSFFYIIILLGNLLIMLTVCLSNLFKSPMYFFLSFLSFVDICYSSVTAPKMIVDLLAKDKTISYVGCMLQLFGVHFFGCTEIFILTVMAYDRYVAICKPLHYMTIMNRETCNKMLLGTWVGGFLHSIIQVALVVQLPFCGPNEIDHYFCDVHPVLKLACTETYIVGVVVTANSGTIALGSFVILLISYSIILVSLRKQSAEGRRKALSTCGSHIAMVVIFFGPCTFMYMRPDTTFSEDKMVAVFYTIITPMLNPLIYTLRNKEVKDALKRLLKRKCC

SEQ ID NO: 186 - protein, 18 aa, synthetic construct
  source 1..18: note = C-terminal domain sequence
KNKEVKDALKRLLKRKCC

SEQ ID NO: 187 - protein, 18 aa, synthetic construct
  source 1..18: note = C-terminal domain sequence
RTKEVKDALKRLLKRKCC

SEQ ID NO: 188 - protein, 18 aa, synthetic construct
  source 1..18: note = C-terminal domain sequence
RQKEVKDALKRLLKRKCC

SEQ ID NO: 189 - protein, 18 aa, synthetic construct
  source 1..18: note = C-terminal domain sequence
RNHEVKDALKRLLKRKCC

SEQ ID NO: 190 - protein, 18 aa, synthetic construct
  source 1..18: note = C-terminal domain sequence
RNKEVKDGLKRLLKRKCC

SEQ ID NO: 191 - protein, 18 aa, synthetic construct
  source 1..18: note = C-terminal domain sequence
RNKEVKDVLKRLLKRKCC

SEQ ID NO: 192 - protein, 18 aa, synthetic construct
  source 1..18: note = C-terminal domain sequence
RNKEVKDAMKRLLKRKCC

SEQ ID NO: 193 - protein, 18 aa, synthetic construct
  source 1..18: note = C-terminal domain sequence
RNKEVKDALKHLLKRKCC

SEQ ID NO: 194 - protein, 18 aa, synthetic construct
  source 1..18: note = C-terminal domain sequence
RNKEVKDALKRVVKRKCC

SEQ ID NO: 195 - protein, 18 aa, synthetic construct
  source 1..18: note = C-terminal domain sequence
RNKEVKDALKRLRKRKCC

SEQ ID NO: 196 - protein, 18 aa, synthetic construct
  source 1..18: note = C-terminal domain sequence
RNKEVKDALKRLKKRKCC

SEQ ID NO: 197 - protein, 18 aa, synthetic construct
  source 1..18: note = C-terminal domain sequence
RNKEVKDALKRLLERKCC

SEQ ID NO: 198 - protein, 17 aa, synthetic construct
  source 1..17: note = C-terminal domain sequence
RNKEVKDALKRLLKRKC

SEQ ID NO: 199 - protein, 313 aa, synthetic construct
  source 1..313: note = OR5A1 modified sequence
MSITKAWNSSSVTMFILLGFTDHPELQALLFVTFLGIYLTTLAWNLALIFLIRGDTHLHTPMYFFLSNLSFIDICYSSAVAPNMLTDFFWEQKTISFVGCAAQFFFFVGMGLSECLLLTAMAYDRYAAISSPLLYPTIMTQGLCTRMVVGAYVGGFLSSLIQASSIFRLHFCGPNIINHFFCDLPPVLALSCSDTFLSQVVNFLVVVTVGGTSFLQLLISYGYIVSAVLKIPSAEGRWKACNTCASHLMVVTLLFGTALFVYLRPSSSYLLGRDKVVSVFYSLVIPMLNPLIYSLRNKEVKDALKRLLKRKCC

SEQ ID NO: 200 - DNA, 942 bp, synthetic construct
  source 1..942: mol_type = other DNA; note = OR5A1 modified sequence
atgtccataaccaaagcctggaacagctcatcagtgaccatgttcatcctcctgggattcacagaccatccagaactccaggccctcctctttgtgaccttcctgggcatctatcttacgaccctggcctggaacctggccctcatttttctgatcagaggtgacacccatctgcacacacccatgtacttcttcctaagcaacttatctttcattgacatctgctactcttctgctgtggctcccaatatgctcactgacttcttctgggagcagaagaccatatcatttgtgggctgtgctgctcagttttttttctttgtcggcatgggtctgtctgagtgcctcctcctgactgctatggcatacgaccgatatgcagccatctccagcccccttctctaccccactatcatgacccagggcctctgtacacgcatggtggttggggcatatgttggtggcttcctgagctccctgatccaggccagctccatatttaggcttcacttttgcggacccaacatcatcaaccacttcttctgcgacctcccaccagtcctggctctgtcttgctctgacaccttcctcagtcaagtggtgaatttcctcgtggtggtcactgtcggaggaacatcgttcctccaactccttatctcctatggttacatagtgtctgcggtcctgaagatcccttcagcagagggccgatggaaagcctgcaacacgtgtgcctcgcatctgatggtggtgactctgctgtttgggacagccctttttgtgtacttgcgacccagctccagctacttgctaggcagggacaaggtggtgtctgttttctattcattggtgatccccatgctgaaccctctcatttacagtttgaggaacaaagaagttaaagatgccttaaagaggttgctaaagagaaagtgctgctga

SEQ ID NO: 201 - DNA, 933 bp, synthetic construct
  source 1..933: mol_type = other DNA; note = OR7C1 modified sequence
atggaaacaggaaatcaaacacatgcccaagaatttctcctcctgggattttcagcaacgtcagagattcagttcattctctttgggctgttcctctccatgtacctagtcactttcaccgggaacctgctcatcatcctggccatatgctcagactcccacctccacacccccatgtacttcttcctctccaacctgtcttttgctgacctctgttttacctccacgactgtcccaaagatgttactgaatatactgacacagaacaaattcataacatatgcaggctgtctcagtcagattttttttttcacttcatttggatgcctggacaatttactcttgaccgtgatggcctatgaccgcttcgtggccatctgtcaccccctgcactatacggtcatcatgaacccccagctctgtggactgctggttctggggtcctggtgcatcagtgtcatgggttccctgctcgagaccttgactgttttgaggctgtccttctgcaccgaaatggaaattccacactttttttgtgatctacttgaagtcctgaagctcgcctgttctgacaccttcattaataacgtggtgatatactttgcaactggcgtcctgggtgtgatttccttcactggaatatttttctcttactataaaattgttttctctatactgaggatttcctcagctgggagaaagcacaaagcgttttccacctgtggttcccacctctcagtggtcaccttgttctatggcacgggctttggggtctatctcagttctgcagccacaccatcttctaggacaagtctggtggcctcagtgatgtacaccatggtcacccccatgctgaaccccttcatctacagcctgaggaacaaagaagttaaagatgccttaaagaggttgctaaagagaaagtgctgctga

SEQ ID NO: 202 - DNA, 933 bp, synthetic construct
  source 1..933: mol_type = other DNA; note = OR9Q2 modified sequence
atggctgaaaggaattacaccgtagtgacggagttcttccttactgcatttactgaacatctccagtggagggttcctctcttcctcatatttttgagtttctatcttgccactatgttagggaacacaggcatgatcctcctgatccgtggcgatcgtcggctccacaccccgatgtacttcttcctcagccacctttccttggtggacatctgctactcgtccgccatcatccctcagatgctggctgtgctgtgggagcacggcacaaccatctcccaggctcgctgtgcagctcagttcttcctcttcaccttctttgcctccatcgactgctaccttctggccatcatggcctatgaccgctacacggccgtgtgccagcccctgctttatgtcaccatcataaccgagaaggcccgctggggcctagtcactggggcttacgttgctggttttttcagtgcctttgttcgaacggtcacagccttcactctctccttttgtggaaacaatgagatcaacttcattttctgtgacctccctcctctattaaaactctcctgtggggacagctacactcaggaagtggtgattattgtgtttgctcttttcgtcatgcctgcctgtatcttggtgatcttggtatcctacctgtttatcattgtggccatcctgcagatccactctgctggaggccgggccaagaccttctccacctgcgcctcccacctcactgccgtcgctcttttctttggcaccctcatcttcatgtacctgcgagacaacacaggccagtcctccgagggagaccgagtggtgtctgtgctctacacggtggtgaccccaatgctgaatccccttatctatagcctgaggaacaaagaagttaaagatgccttaaagaggttgctaaagagaaagtgctgctga

SEQ ID NO: 203 - DNA, 930 bp, synthetic construct
  source 1..930: mol_type = other DNA; note = OR8K3 modified sequence
atggaacaacacaatctaacaacggtgaatgaattcattcttacgggaatcacagatatcgctgagctgcaggcaccattatttgcattgttcctcatgatctatgtgatctcagtgatgggcaatttgggcatgattgtcctcaccaagttggactccaggttgcaaacccctatgtacttttttctcagacatctggctttcatggatcttggttattcaacaactgtgggacccaaaatgttagtaaattttgttgtggataagaatataatttcttattatttttgtgcaacacagctagctttctttcttgtgttcattggtagtgaactttttattctctcagccatgtcctacgaccgctatgtggccatctgtaaccctctgctatacacagtaatcatgtcacgaagggtatgtcaggtgctggtagcaatcccttacctctattgcacattcatttctcttctagtcaccataaagatttttactttatccttctgtggctacaacgtcattagtcatttctactgtgacagtctccctttgttacctttgctttgttcaaatacacatgaaattgaattgataattctgatctttgcagctattgatttgatttcatctcttctgatagttcttttatcttacctgctcatccttgtagccattctcaggatgaattctgctggcagacaaaaggctttttctacctgtggagcccacctgacagtggtcatagtgttctatgggactttgcttttcatgtacgtgcagcccaagtccagtcattcctttgacactgataaagtggcttccatattttacaccctggttatccccatgttgaatcccttgatctatagtttaaggaacaaagaagttaaagatgccttaaagaggttgctaaagagaaagtgctgctga

SEQ ID NO: 204 - DNA, 930 bp, synthetic construct
  source 1..930: mol_type = other DNA; note = OR10J5 modified sequence
atgaagagaaagaacttcacagaagtgtcagaattcattttcttgggattttctagctttggaaagcatcagataaccctctttgtggttttcctaactgtctacattttaactctggttgctaacatcatcattgtgactatcatctgcattgaccatcatctccacactcccatgtatttcttcctaagcatgctggctagttcagagacggtgtacacactggtcattgtgccacgaatgcttttgagcctcatttttcataaccaacctatctccttggcaggctgtgctacacaaatgttcttttttgttatcttggccactaataattgcttcctgcttactgcaatggggtatgaccgctatgtggccatctgcagacccctgagatacactgtcatcatgagcaagggactatgtgcccagctggtgtgtgggtcctttggcattggtctgactatggcagttctccatgtgacagccatgttcaatttgccgttctgtggcacagtggtagaccacttcttttgtgacatttacccagtcatgaaactttcttgcattgataccactatcaatgagataataaattatggtgtaagttcatttgtgatttttgtgcccataggcctgatatttatctcctatgtccttgtcatctcttccatccttcaaattgcctcagctgagggccggaagaagacctttgccacctgtgtctcccacctcactgtggttattgtccactgtggctgtgcctccattgcctacctcaagccgaagtcagaaagttcaatagaaaaagaccttgttctctcagtgacgtacaccatcatcactcccttgctgaaccctgttgtttacagtctgaggaacaaagaagttaaagatgccttaaagaggttgctaaagagaaagtgctgctga

SEQ ID NO: 205 - DNA, 933 bp, synthetic construct
  source 1..933: mol_type = other DNA; note = OR1C1 modified sequence
atggaaaaaagaaatctaacagttgtcagggaattcgtccttctgggacttcctagctcagcagagcagcagcacctcctgtctgtgctctttctctgtatgtatttagccaccaccttggggaacatgctcatcattgcgacgattggctttgactctcacctccattcccctatgtacttcttccttagtaacttggcctttgttgacatctgctttacgtcgactacagtcccccaaatggtagtgaatatcttgactggcaccaagactatctcttttgcaggctgcctcacccagctcttcttcttcgtttcttttgtgaatatggacagcctccttctgtgtgtgatggcatatgatagatatgtggcgatttgccaccccttacattacaccgccagaatgaacctgtgcctttgtgtccagctagtggctggactgtggcttgttacttacctccacgccctcctgcatactgtcctaatagcacagctgtccttctgtgcctccaatatcatccatcatttcttctgtgatctcaatcctctcctgcagctctcttgctctgacgtctccttcaatgtaatgatcatttttgcagtaggcggtctattggctctcacgccccttgtctgtatcctcgtatcttatggacttatcttctccactgttctgaagatcacctctactcagggcaagcagagagctgtttccacctgcagctgccacctgtcagtggtggtgttgttttacggcacagccatcgccgtctatttcagcccttcatccccccatatgcctgagagcgacactctgtcaaccatcatgtattcaatggtggctccgatgctgaatcctttcatctataccctaaggaacaaagaagttaaagatgccttaaagaggttgctaaagagaaagtgctgctga

SEQ ID NO: 206 - DNA, 933 bp, synthetic construct
  source 1..933: mol_type = other DNA; note = OR7D4 modified sequence
atggaagcagaaaaccttacagaattatcaaaatttctcctcctgggactctcagatgatcctgaactgcagcccgtcctctttgggctgttcctgtccatgtacctggtcacggtgctggggaacctgctcatcattctggccgtcagctctgactcccacctccacacccccatgtacttcttcctctccaacctgtcctttgttgacatctgtttcatctccaccacagtccccaagatgctagtgagcatccaggcacggagcaaagacatctcctacatggggtgcctcactcaggtgtattttttaatgatgtttgctggaatggatactttcctactggccgtgatggcctatgaccggtttgtggccatctgccacccactgcactacacggtcatcatgaacccctgcctctgtggcctcctggttctggcatcttggttcatcattttctggttctccctggttcatattctactgatgaagaggttgaccttctccacaggcactgagattccgcatttcttctgtgaaccggctcaggtcctcaaggtggcctgctctaacaccctcctcaataacattgtcttgtatgtggccacggcactgctgggtgtgtttcctgtagctgggatcctcttctcctactctcagattgtctcctccttaatgggaatgtcctccaccaagggcaagtacaaagccttttccacctgtggatctcacctctgtgtggtctccttgttctatggaacaggacttggggtctatctgagttctgctgtgacccattcttcccagagcagctccaccgcctcagtgatgtacgccatggtcacccccatgctgaaccccttcatctacagcctgaggaacaaagaagttaaagatgccttaaagaggttgctaaagagaaagtgctgctga

SEQ ID NO: 207 - DNA, 927 bp, synthetic construct
  source 1..927: mol_type = other DNA; note = OR2T4 modified sequence
atggccaaccacactggatggtcggatttcatcctgttgggactcttcagacaatccaaacatccagcactactttgtgtggtcatttttgtggttttcctgatggcgttgtctggaaatgctgtcctgatccttctgatacactgtgacgcccacctccacacccccatgtactttttcatcagtcaattgtctctcatggacatggcgtacatttctgtcactgtgcccaagatgctcctggaccaggtcatgggtgtgaataagatctcagcccctgagtgtgggatgcagatgttcttctacgtgacactagcaggttcagaatttttccttctagccaccatggcctatgaccgctacgtggccatctgccatcctctccgttaccctgtcctcatgaaccatagggtgtgtctcttcctgtcatcaggctgctggttcctgggctcagtggatggcttcacattcactcccatcaccatgaccttccccttccgtggatcccgggagattcatcatttcttctgtgaagttcctgctgtattgaatctctcctgctcagacacctcactctatgagattttcatgtacttgtgctgtgtcctcatgctcctcatccctgtggtgatcatttcaagctcctatttactcatcctcctcaccatccacgggatgaactcagcagagggccggaaaaaggcctttgccacctgctcctcccacctgactgtggtcatcctcttctatggggctgccatctacacctacatgctccccagctcctaccacacccctgagaaggacatgatggtatctgtcttctataccatcctcactccagtggtgaaccctttaatctatagtcttaggaacaaagaagttaaagatgccttaaagaggttgctaaagagaaagtgctgctga

SEQ ID NO: 208 - DNA, 927 bp, synthetic construct
  source 1..927: mol_type = other DNA; note = OR5B12 modified sequence
atggagaacaacacagaggtgactgaattcatccttgtggggttaactgatgacccagaactgcagatcccactcttcatagtcttccttttcatctacctcatcactctggttgggaacctggggatgattgaattgattctactggactcctgtctccacacccccatgtacttcttcctcagtaacctctccctggtggactttggttattcctcagctgtcactcccaaggtgatggtggggtttctcacaggagacaaattcatattatataatgcttgtgccacacaattcttcttctttgtagcctttatcactgcagaaagtttcctcctggcatcaatggcctatgaccgctatgcagcattgtgtaaacccctgcattacaccaccaccatgacaacaaatgtatgtgctcgcctggccataggctcctacatctgtggtttcctgaatgcatccattcatactgggaacactttcaggctctccttctgtagatccaatgtagttgaacactttttctgtgatgctcctcctctcttgactctctcatgttcagacaactacatcagtgagatggttattttttttgtggtgggattcaatgacctcttttctatcctggtaatcttgatctcctacttatttatatttatcaccatcatgaagatgcgctcacctgaaggacgccagaaggccttttctacttgtgcttcccaccttactgcagtttccatcttttatgggacaggaatctttatgtacttacgacctaactccagccatttcatgggcacagacaaaatggcatctgtgttctatgccatagtcattcccatgttgaatccactggtctacagcctgaggaacaaagaagttaaagatgccttaaagaggttgctaaagagaaagtgctgctga

SEQ ID NO: 209 - DNA, 933 bp, synthetic construct
  source 1..933: mol_type = other DNA; note = OR7A17 modified sequence
atggaaccagagaatgacacagggatttcagaatttgttcttctgggactttctgaggaaccagaattgcagcccttcctctttgggctgtttctgtccatgtacctggtcactgtgctcgggaatctgctcatcatcctggccacaatctcagactcccacctccacacccccatgtacttcttcctctccaacctgtcctttgcagacatctgtttcatctccactacaatcccaaagatgctcattaacatccagacacagagcagagtcatcacctatgcaggctgcatcacccagatgtgcttttttgtactttttggagggttagacagcttactcctggctgtgatggcctatgatcggtttgtggccatctgtcatcctctgcactacacagtcatcatgaaccctcggctctgtggactcctggttctggcatcctggatgattgctgccctgaattccttgtcacaaagcttaatggtattgtggctgtccttctgcacagacttggaaatcccccactttttctgtgaacttaatcaggtcatccaccttgcctgttctgacacctttcttaatgacatggggatgtattttgcagcagggctgctggctggtggtccccttgtggggatcctttgctcttactctaagatagtttcctccatacgtgcaatctcatcagctcaggggaagtacaaggcattttccacctgtgcatcacacctctcagttgtctctttattttgttgtacgggcctaggtgtgtaccttacttctgctgcaacccacaactcacacacaagtgcaacagcctcagtgatgtacactgtggccacccccatgctgaacccctttatctacagtctgaggaacaaagaagttaaagatgccttaaagaggttgctaaagagaaagtgctgctga

SEQ ID NO: 210 - DNA, 936 bp, synthetic construct
  source 1..936: mol_type = other DNA; note = OR10H5 modified sequence
atgcaggggctaaaccacacctccgtgtctgaattcatcctcgttggcttctctgccttcccccacctccagctgatgctcttcctgctgttcctgctgatgtacctgttcacgctgctgggcaacctgctcatcatggccactgtctggagcgagcgcagcctccacatgcccatgtacctcttcctgtgtgccctctccatcaccgagatcctctacaccgtggccatcatcccgcgcatgctggccgacctgctgtccacccagcgctccatcgccttcctggcctgtgccagtcagatgttcttctccttcagcttcggcttcacccactccttcctgctcactgtcatgggctacgaccgctacgtggccatctgccaccccctgcgttacaacgtgctcatgagcctgcggggctgcacctgccgggtgggctgctcctgggctggtggcttggtcatggggatggtggtgacctcggccattttccacctcgccttctgtggacacaaggagatccaccatttcttctgccacgtgccacctctgttgaagttggcctgtggagatgatgtgctggtggtggccaaaggcgtgggcttggtgtgtatcacggccctgctgggctgttttctcctcatcctcctctcctatgccttcatcgtggccgccatcttgaagatcccttctgctgaaggtcggaacaaggccttctccacctgtgcctctcacctcactgtggtggtcgtgcactatggctttgcctccgtcatttacctgaagcccaaaggtccccagtctccggaaggagacaccttgatgggcatcacctacacggtcctcacacccttcctcagccccatcatcttcagcctcaggaacaaagaagttaaagatgccttaaagaggttgctaaagagaaagtgctgctga

SEQ ID NO: 211 - DNA, 948 bp, synthetic construct
  source 1..948: mol_type = other DNA; note = OR52A5 modified sequence
atgccgacattcaatggctcagtcttcatgccctctgcgtttatactaattgggattcctggtctggagtcagtgcagtgttggattgggattcctttctctgccatgtatcttattggtgtgattggaaattccctaattttagttataatcaaatatgaaaacagcctccatatacccatgtacatttttttggccatgttggcagccacagacattgcacttaacacctgcattcttcccaaaatgttaggcatcttctggtttcatttgccagagatttcttttgatgcctgtctttttcaaatgtggcttattcactcattccaggcaattgaatcgggtatccttctggcaatggccctggatcgctatgtggccatctgtatccccttgagacatgccaccatcttttcccagcagttcttaactcatattggacttggggtgacactcagggctgccattcttataataccttccttagggctcatcaaatgctgtctgaaacactatcgaactacagtcatctctcactcttactgtgagcacatggccatcgtgaagctggctactgaagatatccgagtcaacaagatatatggcctatttgttgcctttgcaatcctagggtttgacataatatttataaccttgtcctatgtccaaatttttatcactgtctttcagctgccccagaaggaggcacgattcaaggcctttaatacatgcattgcccacatttgtgtcttcctacagttctaccttcttgccttcttctctttcttcacacacaggtttggttcacacataccaccatatattcatatcctcttgtcaaatctttacctgttagtcccaccttttctcaaccctattgtctatggagtgaggaacaaagaagttaaagatgccttaaagaggttgctaaagagaaagtgctgctga

SEQ ID NO: 212 - DNA, 936 bp, synthetic construct
  source 1..936: mol_type = other DNA; note = OR5A2 modified sequence
atggctgtaggaaggaacaacacaattgtgacaaaattcattctcctgggactttcagaccatcctcaaatgaagattttccttttcatgttatttctggggctctacctcctgacgttggcctggaacttaagcctcattgccctcattaagatggactctcacctgcacatgcccatgtacttcttcctcagtaacctgtccttcctggacatctgctatgtgtcctccaccgcccctaagatgctgtctgacatcatcacagagcagaaaaccatttcctttgttggctgtgccactcagtactttgtcttctgtgggatggggctgactgaatgctttctcctggcagctatggcctatgaccggtatgctgcaatctgcaaccccttgctttacacagtcctcatatcccatacactttgtttaaagatggtggttggcgcctatgtgggtggattccttagttctttcattgaaacatactctgtctatcagcatgatttctgtgggccctatatgatcaaccactttttctgtgacctccctccagtcctggctctgtcctgctctgataccttcaccagcgaggtggtgaccttcatagtcagtgttgtcgttggaatagtgtctgtgctagtggtcctcatctcttatggttacattgttgctgctgttgtgaagatcagctcagctacaggtaggacaaaggccttcagcacttgtgcctctcacctgactgctgtgaccctcttctatggttctggattcttcatgtacatgcgacccagttccagctactccctaaacagggacaaggtggtgtccatattctatgccttggtgatccccgtggtgaatcccatcatctacagttttaggaacaaagaagttaaagatgccttaaagaggttgctaaagagaaagtgctgctga

SEQ ID NO: 213 - DNA, 942 bp, synthetic construct
  source 1..942: mol_type = other DNA; note = OR1N2 modified sequence
atgggaaaaccaggcagagtgaaccaaaccactgtttcagacttcctccttttaggactctctgagcggccagaggagcagcctcttctgtttggcatcttccttggcatgtacctggtcaccatggtggggaacctgctcattatcctggccatcagctctgacccacacctccatactcccatgtacttctttctggccaacctgtcattaactgatgcctgtttcacttctgcctccatccccaaaatgctggccaacattcatacccagagtcagatcatctcctattctgggtgtcttgcacagctatatttcctccttatgtttggtggccttgacaactgcctgctggctgtgatggcatatgaccgctatgtggccatctgccaaccactccattacagcacatctatgagtccccagctctgtgcactaatgctgggtgtgtgctgggtgctaaccaactgtcctgccctgatgcacacactgttgctgacccgcgtggctttctgtgcccagaaagccatccctcatttctactgtgatcccagtgctctcctgaagcttgcctgctcagatacccatgtaaacgagctgatgatcatcaccatgggcttgctgttcctcactgttcccctcctgctgatcgtcttctcctatgtccgcattttctgggctgtgtttggcatctcatctcctggagggagatggaaggccttctctacctgtggttctcatctcacggtggttctgctcttctatgggtctcttatgggtgtgtatttacttcctccatcaacttactctacagagagggaaagtagggctgctgttctctatatggtgattattcccatgctaaacccattcatttatagcttgaggaacaaagaagttaaagatgccttaaagaggttgctaaagagaaagtgctgctga

SEQ ID NO: 214 - DNA, 942 bp, synthetic construct
  source 1..942: mol_type = other DNA; note = OR52E8 modified sequence
atgtctacgtctaatcacacccagttccatccttcttcattcctactgctgggtatcccagggctagaagatgtgcacatttggattggagtcccttttttctttgtgtatcttgttgcactcctgggaaacactgctctcttgtttgtgatccagactgagcagagtctccatgagcctatgtactacttcctggccatgttggattccattgacctgggcttgtctacagccaccatccccaaaatgttgggcatcttctggttcaataccaaagaaatatcttttggaggctgcctttctcacatgttcttcatccatttcttcactgctatggagagcattgtgttggtggccatggcctttgaccgctacattgccatttgcaaacctcttcggtacaccatgatcctcaccagcaaaatcatcagcctcattgcaggcattgctgtcctgaggagcctgtacatggttgttccactggtgtttctccttctgaggctgcccttctgtgggcatcgtatcatccctcatacttattgtgagcacatgggcattgcccgtctggcctgtgccagcatcaaagtcaacattaggtttggccttggcaacatatctctcttgttactggatgttatccttattattctctcctatgtcaggatcctgtatgctgtcttctgcctgccctcctgggaagctcgactcaaagctctcaacacctgtggttctcatattggtgttatcttagccttttttacaccagcatttttttcattcttgacacatcgttttggccataatatcccacagtatatacatattatattagccaacctgtatgtggttgtcccaccagccctcaatcctgtaatctatggagtcaggaacaaagaagttaaagatgccttaaagaggttgctaaagagaaagtgctgctga

SEQ ID NO: 215 - DNA, 948 bp, synthetic construct
  source 1..948: mol_type = other DNA; note = OR56A4 modified sequence
atggcatctcccagcaatgactccactgccccagtctctgaattcctcctcatctgcttccccaacttccagagctggcagcactggttgtctctgcccctcagccttctcttcctcctggccatgggagctaacaccaccctcctgatcaccatccagctggaggcctctctgcaccagcccctgtactacctgctcagcctcctctccctgctggacatcgtgctctgcctcaccgtcatccccaaggtcctggccatcttctggtttgacctcaggtcgatcagcttcccagcctgcttcctccagatgttcatcatgaacagttttttgaccatggagtcctgcacgttcatggtcatggcctatgaccgttatgtggccatctgccatccattgagatacccgtctatcatcactgaccagtttgtggctagggccgtggtctttgttatagcccggaatgcctttgtttctcttcctgttcccatgctttctgccaggctcagatactgtgcaggaaacataatcaagaactgcatctgcagtaacctgtctgtgtccaaactctcttgtgatgacatcactttcaatcagctctaccagtttgtggcaggctggactctgttgggctctgatcttatccttattgttatctcctattcttttatattgaaagttgtgcttaggatcaaggccgagggtgctgtggccaaggccttgagcacgtgtggttcccacttcatcctcatcctcttcttcagcacagtcctgctggttctggtcatcactaacctggccaggaagagaattcctccagatgtccccatcctgctcaacatcctgcaccacctcattcccccagctctgaaccccattgtttatggtgtgaggaacaaagaagttaaagatgccttaaagaggttgctaaagagaaagtgctgctga

SEQ ID NO: 216 - DNA, 933 bp, synthetic construct
  source 1..933: mol_type = other DNA; note = OR2C1 modified sequence
atggacggggtgaatgatagctccttgcagggctttgttctgatgggcatatcagaccatccccagctggagatgatcttttttatagccatcctcttctcctatttgctgaccctacttgggaactcaaccatcatcttgctttcccgcctggaggcccggctccatacacccatgtacttcttcctcagcaacctctcctccttggaccttgctttcgctactagttcagtcccccaaatgctgatcaatttatggggaccaggcaagaccatcagctatggtggctgcataacccagctctatgtcttcctttggctgggggccaccgagtgcatcctgctggtggtgatggcatttgaccgctacgtggcagtgtgccggcccctccgctacaccgccatcatgaacccccagctctgctggctgctggctgtgattgcctgcctgggtggcttgggcaactctgtgatccagtcaacattcactctgcagctcccattgtgtgggcaccggagggtggagggattcctctgcgaggtgcctgccatgatcaaactggcctgtggcgacacaagtctcaaccaggctgtgctcaatggtgtctgcaccttcttcactgcagtcccactaagcatcatcgtgatctcctactgcctcattgctcaggcagtgctgaaaatccgctctgcagaggggaggcgaaaggcgttcaatacgtgcctctcccatctgctggtggtgttcctcttctatggctcagccagctatgggtatctgcttccggccaagaacagcaaacaggaccagggcaagttcatttccctgttctactcgttggtcacacccatggtgaatcccctcatctacacgctgaggaacaaagaagttaaagatgccttaaagaggttgctaaagagaaagtgctgctga

SEQ ID NO: 217 - DNA, 924 bp, synthetic construct
  source 1..924: mol_type = other DNA; note = OR2T11 modified sequence
atgacgaacacatcatcctctgacttcaccctcctggggcttctggtgaacagtgaggctgccgggattgtatttacagtgatccttgctgttttcttgggggccgtgactgcaaatttggtcatgatattcttgattcaggtggactctcgcctccacacccccatgtactttctgctcagtcagctgtccatcatggacacccttttcatctgtaccactgtcccaaaactcctggcagacatggtttctaaagagaagatcatttcctttgtggcctgtggcatccagatcttcctctacctgaccatgattggttctgagttcttcctcctgggcctcatggcctatgaccgctacgtggctgtctgtaaccctctgagatacccagtcctgatgaaccgcaagaagtgtcttttgctggctgctggtgcctggtttgggggctccctcgatggctttctgctcactcccatcaccatgaatgtcccttactgtggctcccgaagtatcaaccattttttctgtgagatcccagcagttctgaaactggcctgtgcagacacgtccttgtatgaaactctgatgtacatctgctgtgtcctcatgttgctcatccccatctctatcatctccacttcctactccctcatcttgttaaccatccaccgcatgccctctgctgaaggtcgcaaaaaggccttcaccacttgttcctcccacttgactgtagttagcatcttctatggggctgccttctacacatacgtgctgccccagtccttccacacccccgagcaggacaaagtagtgtcagccttctataccattgtcacgcccatgcttaatcctctcatctacagcctcaggaacaaagaagttaaagatgccttaaagaggttgctaaagagaaagtgctgctga

SEQ ID NO: 218 - DNA, 918 bp, synthetic construct
  source 1..918: mol_type = other DNA; note = OR4S2 modified sequence
atggaaaaaataaacaacgtaactgaattcattttctggggtctttctcagagcccagagattgagaaagtttgttttgtggtgttttctttcttctacataatcattcttctgggaaatctcctcatcatgctgacagtttgcctgagcaacctgtttaagtcacccatgtatttctttctcagcttcttgtcttttgtggacatttgttactcttcagtcacagctcccaagatgattgttgacctgttagcaaaggacaaaaccatctcctatgtggggtgcatgttgcaactgtttggagtacatttctttggttgcactgagatcttcatccttactgtaatggcctatgatcgttatgtggctatctgtaaacccctacattatatgaccatcatgaaccgggagacatgcaataaaatgttattagggacgtgggtaggtgggttcttacactccattatccaagtggctctggtagtccaactacccttttgtggacccaatgagatagatcactacttttgtgatgttcaccctgtgttgaaacttgcctgcacagaaacatacattgttggtgttgttgtgacagccaacagtggtaccattgctctggggagttttgttatcttgctaatctcctacagcatcatcctagtttccctgagaaagcagtcagcagaaggcaggcgcaaagccctctccacctgtggctcccacattgccatggtcgttatctttttcggcccctgtacttttatgtacatgcgccctgatacgaccttttcagaggataagatggtggctgtattttacaccattatcactcccatgttaaatcctctgatttatacactgaggaacaaagaagttaaagatgccttaaagaggttgctaaagagaaagtgctgctga

SEQ ID NO: 219 - protein, 22 aa, synthetic construct
  source 1..22: note = C-terminal domain sequence
RNKEVKDALKRLLKRKCCRRRR

SEQ ID NO: 220 - protein, 21 aa, synthetic construct
  source 1..21: note = C-terminal domain sequence
RNKEVKKAIKRLLKRKCCRRR

SEQ ID NO: 221 - protein, 21 aa, synthetic construct
  source 1..21: note = C-terminal domain sequence
RNKEVKKAIKRLFKRKCCRRR

SEQ ID NO: 222 - protein, 60 aa, synthetic construct
  source 1..60: note = M3-Tag
MTLHSNSTTSPLFPNISSSWVHSPSEAGLPLGTVTQLGSYNISQETGNFSSNDTSSDPLG

SEQ ID NO: 223 - protein, 45 aa, synthetic construct
  source 1..45: note = SST3-Tag
MAAVTYPSSVPTTLDPGNASSAWPLDTSLGNASAGTSLAGLAVSG

SEQ ID NO: 224 - protein, 6 aa, synthetic construct
  source 1..6: note = additional residues
CCRRRR

SEQ ID NO: 225 - protein, 7 aa, synthetic construct
  source 1..7: note = consensus TM7 OR class II
NPLIYSL

SEQ ID NO: 226 - protein, 7 aa, synthetic construct
  source 1..7: note = consensus TM7 OR class I
NPIIYSL

SEQ ID NO: 227 - protein, 8 aa, synthetic construct
  source 1..8: note = consensus TM7 OR class I
NPIIYSGL

SEQ ID NO: 228 - protein, 4 aa, synthetic construct
  source 1..4: note = additional residues
CCRK

SEQ ID NO: 229 - protein, 4 aa, synthetic construct
  source 1..4: note = additional residues
CCKR

SEQ ID NO: 230 - protein, 5 aa, synthetic construct
  source 1..5: note = additional residues
CCKRR

SEQ ID NO: 231 - protein, 5 aa, synthetic construct
  source 1..5: note = additional residues
CCRKR

SEQ ID NO: 232 - protein, 5 aa, synthetic construct
  source 1..5: note = additional residues
CCRRK

SEQ ID NO: 233 - protein, 5 aa, synthetic construct
  source 1..5: note = additional residues
CCRKK

SEQ ID NO: 234 - protein, 5 aa, synthetic construct
  source 1..5: note = additional residues
CCKRK

SEQ ID NO: 235 - protein, 5 aa, synthetic construct
  source 1..5: note = additional residues
CCKKR

SEQ ID NO: 236 - protein, 5 aa, synthetic construct
  source 1..5: note = additional residues
CCKKK

SEQ ID NO: 237 - protein, 21 aa, synthetic construct
  source 1..21: note = C-terminal domain sequence
RNKEVKRAIKRLLKRKCCRRR

SEQ ID NO: 238 - protein, 21 aa, synthetic construct
  source 1..21: note = C-terminal domain sequence
RNKEVKRAIKRLFKRKCCRRR

SEQ ID NO: 239 - protein, 31 aa, synthetic construct
  source 1..31: note = wt OR5A2 C-terminal domain sequence
RNKEIKNAMRKAMERDPGISHGGPFIFMTLG

SEQ ID NO: 240 - protein, 31 aa, synthetic construct
  source 1..31: note = OR5A2 C-terminal domain sequence towards consensus
RNKEVKNALRKALERDPGISHGGPFIFMTLG

SEQ ID NO: 241 - protein, 24 aa, synthetic construct
  source 1..24: note = wt OR5B12 C-terminal domain sequence
RNKEVKSAFKKTVGKAKASIGFIF

SEQ ID NO: 242 - protein, 24 aa, synthetic construct
  source 1..24: note = OR5B12 C-terminal domain sequence towards consensus
RNKEVKSALKKTLGKAKASIGFIF

SEQ ID NO: 243 - protein, 17 aa, synthetic construct
  source 1..17: note = wt OR7A17 C-terminal domain sequence
RNKDIKRALKMSFRGKQ

SEQ ID NO: 244 - protein, 17 aa, synthetic construct
  source 1..17: note = OR7A17 C-terminal domain sequence towards consensus
RNKEVKRALKKSLRRKQ

SEQ ID NO: 245 - protein, 310 aa, synthetic construct
  source 1..310: note = OR2M2 modified sequence
MAWENQTFNSDFILLGIFNHSPPHTFLFFLVLGIFLVAFMGNSVMVLLIYLDTQLHTPMYFLLSQLSLMDLMLICTTVPKMAFNYLSGSKSISMAGCVTQIFFYISLSGSECFLLAVMAYDRYIAICHPLRYTNLMNPKICGLMATFSWILGSTDGIIDAVATFSFSFCGSREIAHFFCEFPSLLILSCNDTSIFEEVIFICCIVMLVFPVAIIIASYAGVILAVIHMGSGEGRRKAFTTCSSHLMVVGMYYGAALFMYIRPTSDHSPTQDKMVSVFYTILTPMLNPLIYSLRNKEVKDALKRLLKRKCC

SEQ ID NO: 246 - DNA, 933 bp, synthetic construct
  source 1..933: mol_type = other DNA; note = OR2M2 modified sequence
atggcatgggagaatcagaccttcaactccgacttcatcctccttggaatcttcaatcacagcccaccacacacgttcctcttctttctggtcctgggcatctttttagtggccttcatgggaaactctgtcatggttctcctcatctacctggacacccagctccacacccccatgtacttcctcctcagccaactgtccctcatggacctcatgctcatctgcaccaccgtacccaagatggccttcaactacctgtctggcagcaagtccatttctatggctggttgtgtcacacaaattttcttctatatatcactgtctggctctgaatgttttcttttggctgttatggcttatgaccgctatattgctatttgccaccctctaagatataccaatctcatgaatcctaaaatttgtggacttatggctaccttctcctggatcctgggctctacagatggaatcattgatgctgtagccacattttccttctccttttgtgggtctcgggaaatagcccacttcttctgtgaattcccttccctactaatcctctcatgcaatgacacatcaatatttgaagaggttattttcatctgctgtatagtaatgcttgttttccctgttgcaatcatcattgcttcctatgctggagttattctggctgtcattcacatgggatctggagagggtcgtcgcaaagctttcacgacctgttcctctcacctcatggtggtgggaatgtactatggagcagctttgttcatgtacatacggcccacatctgatcactccccaacgcaggacaagatggtgtctgtattctacaccatcctcactcccatgctgaatcccctcatctacagcctcaggaacaaagaagttaaagatgccttaaagaggttgctaaagagaaagtgctgctga

SEQ ID NO: 247 - protein, 310 aa, synthetic construct
  source 1..310: note = OR7C1 modified sequence
METGNQTHAQEFLLLGFSATSEIQFILFGLFLSMYLVTFTGNLLIILAICSDSHLHTPMYFFLSNLSFADLCFTSTTVPKMLLNILTQNKFITYAGCLSQIFFFTSFGCLDNLLLTVMAYDRFVAICHPLHYTVIMNPQLCGLLVLGSWCISVMGSLLETLTVLRLSFCTEMEIPHFFCDLLEVLKLACSDTFINNVVIYFATGVLGVISFTGIFFSYYKIVFSILRISSAGRKHKAFSTCGSHLSVVTLFYGTGFGVYLSSAATPSSRTSLVASVMYTMVTPMLNPFIYSLRNKEVKRAIKRLFKRKCC

SEQ ID NO: 248 - protein, 313 aa, synthetic construct
  source 1..313: note = OR7C1 modified sequence
METGNQTHAQEFLLLGFSATSEIQFILFGLFLSMYLVTFTGNLLIILAICSDSHLHTPMYFFLSNLSFADLCFTSTTVPKMLLNILTQNKFITYAGCLSQIFFFTSFGCLDNLLLTVMAYDRFVAICHPLHYTVIMNPQLCGLLVLGSWCISVMGSLLETLTVLRLSFCTEMEIPHFFCDLLEVLKLACSDTFINNVVIYFATGVLGVISFTGIFFSYYKIVFSILRISSAGRKHKAFSTCGSHLSVVTLFYGTGFGVYLSSAATPSSRTSLVASVMYTMVTPMLNPFIYSLRNKEVKKAIKRLFKRKCCRRR

SEQ ID NO: 249 - protein, 308 aa, synthetic construct
  source 1..308: note = OR2T4 modified sequence
MANHTGWSDFILLGLFRQSKHPALLCVVIFVVFLMALSGNAVLILLIHCDAHLHTPMYFFISQLSLMDMAYISVTVPKMLLDQVMGVNKISAPECGMQMFFYVTLAGSEFFLLATMAYDRYVAICHPLRYPVLMNHRVCLFLSSGCWFLGSVDGFTFTPITMTFPFRGSREIHHFFCEVPAVLNLSCSDTSLYEIFMYLCCVLMLLIPVVIISSSYLLILLTIHGMNSAEGRKKAFATCSSHLTVVILFYGAAIYTYMLPSSYHTPEKDMMVSVFYTILTPVVNPLIYSLRNKEVKRAIKRLFKRKCC

SEQ ID NO: 250 - protein, 311 aa, synthetic construct
  source 1..311: note = OR2T4 modified sequence
MANHTGWSDFILLGLFRQSKHPALLCVVIFVVFLMALSGNAVLILLIHCDAHLHTPMYFFISQLSLMDMAYISVTVPKMLLDQVMGVNKISAPECGMQMFFYVTLAGSEFFLLATMAYDRYVAICHPLRYPVLMNHRVCLFLSSGCWFLGSVDGFTFTPITMTFPFRGSREIHHFFCEVPAVLNLSCSDTSLYEIFMYLCCVLMLLIPVVIISSSYLLILLTIHGMNSAEGRKKAFATCSSHLTVVILFYGAAIYTYMLPSSYHTPEKDMMVSVFYTILTPVVNPLIYSLRNKEVKKAIKRLFKRKCCRRR

SEQ ID NO: 251 - protein, 308 aa, synthetic construct
  source 1..308: note = OR5B12 modified sequence
MENNTEVTEFILVGLTDDPELQIPLFIVFLFIYLITLVGNLGMIELILLDSCLHTPMYFFLSNLSLVDFGYSSAVTPKVMVGFLTGDKFILYNACATQFFFFVAFITAESFLLASMAYDRYAALCKPLHYTTTMTTNVCARLAIGSYICGFLNASIHTGNTFRLSFCRSNVVEHFFCDAPPLLTLSCSDNYISEMVIFFVVGFNDLFSILVILISYLFIFITIMKMRSPEGRQKAFSTCASHLTAVSIFYGTGIFMYLRPNSSHFMGTDKMASVFYAIVIPMLNPLVYSLRNKEVKRAIKRLFKRKCC

SEQ ID NO: 252 - protein, 311 aa, synthetic construct
  source 1..311: note = OR5B12 modified sequence
MENNTEVTEFILVGLTDDPELQIPLFIVFLFIYLITLVGNLGMIELILLDSCLHTPMYFFLSNLSLVDFGYSSAVTPKVMVGFLTGDKFILYNACATQFFFFVAFITAESFLLASMAYDRYAALCKPLHYTTTMTTNVCARLAIGSYICGFLNASIHTGNTFRLSFCRSNVVEHFFCDAPPLLTLSCSDNYISEMVIFFVVGFNDLFSILVILISYLFIFITIMKMRSPEGRQKAFSTCASHLTAVSIFYGTGIFMYLRPNSSHFMGTDKMASVFYAIVIPMLNPLVYSLRNKEVKKAIKRLFKRKCCRRR

SEQ ID NO: 253 - protein, 20 aa, synthetic construct
  source 1..20: note = OR7D4 terminal domain sequence
RNKDVKGALERLLSRADSCP

SEQ ID NO: 254 - protein, 18 aa, synthetic construct
  source 1..18: note = C-terminal domain sequence
RNREMRKALHRLLGKKCC

SEQ ID NO: 255 - protein, 18 aa, synthetic construct
  source 1..18: note = C-terminal domain sequence
RNREVKKAIHKLIGRKCC

SEQ ID NO: 256 - protein, 18 aa, synthetic construct
  source 1..18: note = C-terminal domain sequence
RNREVRKAVHRLFKRKCC

SEQ ID NO: 257 - protein, 18 aa, synthetic construct
  source 1..18: note = C-terminal domain sequence
RNKEMKKAIHKLFGKKCC

SEQ ID NO: 258 - protein, 18 aa, synthetic construct
  source 1..18: note = C-terminal domain sequence
RNRDVKKAVHKLFRRKCC

SEQ ID NO: 259 - protein, 18 aa, synthetic construct
  source 1..18: note = C-terminal domain sequence
RNRDMKKAVHKLFGKRCC

SEQ ID NO: 260 - protein, 18 aa, synthetic construct
  source 1..18: note = C-terminal domain sequence
RNKELRKALHKLLGRKCC

SEQ ID NO: 261 - protein, 18 aa, synthetic construct
  source 1..18: note = C-terminal domain sequence
RNRDVRKALRRILRRRCC

SEQ ID NO: 262 - protein, 18 aa, synthetic construct
  source 1..18: note = C-terminal domain sequence
RNKDVRKAVRKLIRRRCC

SEQ ID NO: 263 - protein, 18 aa, synthetic construct
  source 1..18: note = C-terminal domain sequence
RNRDVRKAVRRLFRKRCC

SEQ ID NO: 264 - protein, 18 aa, synthetic construct
  source 1..18: note = C-terminal domain sequence
RNKDIKKAVKKLIKKKCC

SEQ ID NO: 265 - protein, 18 aa, synthetic construct
  source 1..18: note = C-terminal domain sequence
RNRELRKAVRRLFKRRCC

SEQ ID NO: 266 - protein, 18 aa, synthetic construct
  source 1..18: note = C-terminal domain sequence
RNKELRKAVRKIIKKKCC

SEQ ID NO: 267 - protein, 18 aa, synthetic construct
  source 1..18: note = C-terminal domain sequence
RNRDVKKAVRRLFRRKCC

SEQ ID NO: 268 - protein, 18 aa, synthetic construct
  source 1..18: note = C-terminal domain sequence
RNREVRKALRRIIRKRCC

SEQ ID NO: 269 - protein, 18 aa, synthetic construct
  source 1..18: note = C-terminal domain sequence
RNKDIRKAVKKIFRRKCC

SEQ ID NO: 270 - protein, 18 aa, synthetic construct
  source 1..18: note = C-terminal domain sequence
RNKDVRKAVRRLIKRKCC

SEQ ID NO: 271 - protein, 18 aa, synthetic construct
  source 1..18: note = C-terminal domain sequence
RNRDLRKAVRKLFKKKCC

SEQ ID NO: 272 - protein, 18 aa, synthetic construct
  source 1..18: note = C-terminal domain sequence
RNRDLRKALRRIFKRRCC

SEQ ID NO: 273 - protein, 18 aa, synthetic construct
  source 1..18: note = C-terminal domain sequence
RNRDVRKAIKKLIRKRCC

SEQ ID NO: 274 - protein, 18 aa, synthetic construct
  source 1..18: note = C-terminal domain sequence
RNKELKKAIKRILKKKCC

SEQ ID NO: 275 - protein, 18 aa, synthetic construct
  source 1..18: note = C-terminal domain sequence
RNRDVRKAIRKLLKRKCC

SEQ ID NO: 276 - protein, 18 aa, synthetic construct
  source 1..18: note = C-terminal domain sequence
RNRDLRKAVRRIFKKRCC

SEQ ID NO: 277 - protein, 18 aa, synthetic construct
  source 1..18: note = C-terminal domain sequence
RNRDVRKAVRKLFKRRCC

SEQ ID NO: 278 - protein, 18 aa, synthetic construct
  source 1..18: note = C-terminal domain sequence
RNRDVRKALRRLFKKRCC

SEQ ID NO: 279 - protein, 18 aa, synthetic construct
  source 1..18: note = C-terminal domain sequence
RNKELKKALRKLIGKKCC

SEQ ID NO: 280 - protein, 18 aa, synthetic construct
  source 1..18: note = C-terminal domain sequence
RNREMRKAIKKIIKKKCC

SEQ ID NO: 281 - protein, 18 aa, synthetic construct
  source 1..18: note = C-terminal domain sequence
RNKEIKKAIKKIIKKRCC

SEQ ID NO: 282 - protein, 18 aa, synthetic construct
  source 1..18: note = C-terminal domain sequence
RNRDVKKAIRRLFRRRCC

SEQ ID NO: 283 - protein, 18 aa, synthetic construct
  source 1..18: note = C-terminal domain sequence
RNREVKKAVKKLIGKRCC

SEQ ID NO: 284 - protein, 18 aa, synthetic construct
  source 1..18: note = C-terminal domain sequence
RNREMRKALRRLFRKRCC

SEQ ID NO: 285 - protein, 18 aa, synthetic construct
  source 1..18: note = C-terminal domain sequence
RNKELKKALRRLIGRRCC

SEQ ID NO: 286 - protein, 18 aa, synthetic construct
  source 1..18: note = C-terminal domain sequence
RNRDVKKALRKLIGKRCC

SEQ ID NO: 287 - protein, 18 aa, synthetic construct
  source 1..18: note = C-terminal domain sequence
RNREVKKAVKKLIRRKCC

SEQ ID NO: 288 - protein, 18 aa, synthetic construct
  source 1..18: note = C-terminal domain sequence
RNKEVRKALKKLFGKKCC

SEQ ID NO: 289 - protein, 18 aa, synthetic construct
  source 1..18: note = C-terminal domain sequence
RNKEIRKALRRLFGKKCC

SEQ ID NO: 290 - protein, 18 aa, synthetic construct
  source 1..18: note = C-terminal domain sequence
RNKDVKKALRRLFGKKCC

SEQ ID NO: 291 - protein, 18 aa, synthetic construct
  source 1..18: note = C-terminal domain sequence
RNKELKKAIKRLIRRKCC

SEQ ID NO: 292 - protein, 18 aa, synthetic construct
  source 1..18: note = C-terminal domain sequence
RNKDVRKAVKRLLKKRCC

SEQ ID NO: 293 - protein, 18 aa, synthetic construct
  source 1..18: note = C-terminal domain sequence
RNKELRKAIRRLLRRRCC

SEQ ID NO: 294 - protein, 18 aa, synthetic construct
  source 1..18: note = C-terminal domain sequence
RNRDIRKALRKLFKKKCC

SEQ ID NO: 295 - protein, 18 aa, synthetic construct
  source 1..18: note = C-terminal domain sequence
RNRELKKALRRLLRRRCC

SEQ ID NO: 296 - protein, 18 aa, synthetic construct
  source 1..18: note = C-terminal domain sequence
RNREVKKALRRLFGKKCC

SEQ ID NO: 297 - protein, 18 aa, synthetic construct
  source 1..18: note = C-terminal domain sequence
RNRDVRKALKRLLKRKCC

SEQ ID NO: 298 - protein, 18 aa, synthetic construct
  source 1..18: note = C-terminal domain sequence
RNRDMRKAIRKLFGRKCC

SEQ ID NO: 299 - protein, 18 aa, synthetic construct
  source 1..18: note = C-terminal domain sequence
RNRELKKAIRKLLKRKCC

SEQ ID NO: 300 - protein, 18 aa, synthetic construct
  source 1..18: note = C-terminal domain sequence
RNRDIRKAVKKLFGKKCC

SEQ ID NO: 301 - protein, 18 aa, synthetic construct
  source 1..18: note = C-terminal domain sequence
RNKEVKKAIRKLFGRRCC

SEQ ID NO: 302 - protein, 18 aa, synthetic construct
  source 1..18: note = C-terminal domain sequence
RNREVRKAVRKLFRRKCC

SEQ ID NO: 303 - protein, 18 aa, synthetic construct
  source 1..18: note = C-terminal domain sequence
RNRDMKKALKKLFRRRCC

SEQ ID NO: 304 - protein, 18 aa, synthetic construct
  source 1..18: note = C-terminal domain sequence
RNRDVRKALKRLLGRRCC

SEQ ID NO: 305 - protein, 18 aa, synthetic construct
  source 1..18: note = C-terminal domain sequence
RNKDLKKAVKKLFGRKCC

SEQ ID NO: 306 - protein, 18 aa, synthetic construct
  source 1..18: note = C-terminal domain sequence
RNKDVRKAVRRLFGRRCC

SEQ ID NO: 307 - protein, 16 aa, synthetic construct
  source 1..16: note = C-terminal domain sequence
RNRDVRKALRRLFRKK

SEQ ID NO: 308 - protein, 16 aa, synthetic construct
  source 1..16: note = C-terminal domain sequence
RNRDVRRALRRLFRKK

SEQ ID NO: 309 - protein, 18 aa, synthetic construct
  source 1..18: note = C-terminal domain sequence
RNRDVRKALRRLFRKKCC

SEQ ID NO: 310 - protein, 18 aa, synthetic construct
  source 1..18: note = C-terminal domain sequence
RNRDVRRALRRLFRKKCC

SEQ ID NO: 311 - protein, 16 aa, synthetic construct
  source 1..16: note = C-terminal domain motif
  VARIANT 3: note = K or R
  VARIANT 4: note = E or D or Q
  VARIANT 5: note = V or M or I or L
  VARIANT 6: note = K or R
  VARIANT 7: note = D or K or E or N or R or V or A or Q or G or C or F or H or I or L or M or S or T or W or Y
  VARIANT 9: note = L or I or V
  VARIANT 10: note = K or R or H
  VARIANT 11: note = K or R
  VARIANT 13: note = L or I or F
  VARIANT 14: note = K or R or G
  VARIANT 15: note = K or R
  VARIANT 16: note = K or R
RNXXXXXAXXXJXXXX

SEQ ID NO: 312 - protein, 16 aa, synthetic construct
  source 1..16: note = C-terminal domain motif
  VARIANT 3: note = K or R
  VARIANT 5: note = V or M or I
  VARIANT 6: note = K or R
  VARIANT 7: note = D or K or E or N or R or V or A or Q or G or C or F or H or I or L or M or S or T or W or Y
  VARIANT 9: note = L or I or V
  VARIANT 10: note = K or R
  VARIANT 11: note = K or R
  VARIANT 13: note = L or I or F
  VARIANT 14: note = K or R
  VARIANT 15: note = K or R
  VARIANT 16: note = K or R
RNXEXXXAXXXLXXXX

SEQ ID NO: 313-318 - skipped (6 entries)

SEQ ID NO: 319 - protein, 16 aa, synthetic construct
  source 1..16: note = C-terminal domain motif
  VARIANT 7: note = D or K or E or N or R or V or A or Q or G or C or F or H or I or L or M or S or T or W or Y
RNKEVKXALKRLLKRK

SEQ ID NO: 320 - protein, 18 aa, synthetic construct
  source 1..18: note = C-terminal domain motif
  VARIANT 7: note = D or K or E or N or R or V or A or Q or G or C or F or H or I or L or M or S or T or W or Y
RNKEVKXALKRLLKRKCC

SEQ ID NO: 321 - protein, 18 aa, synthetic construct
  source 1..18: note = C-terminal domain sequence
RNKEVKCALKRLLKRKCC

SEQ ID NO: 322 - protein, 18 aa, synthetic construct
  source 1..18: note = C-terminal domain sequence
RNKEVKFALKRLLKRKCC

SEQ ID NO: 323 - protein, 18 aa, synthetic construct
  source 1..18: note = C-terminal domain sequence
RNKEVKHALKRLLKRKCC

SEQ ID NO: 324 - protein, 18 aa, synthetic construct
  source 1..18: note = C-terminal domain sequence
RNKEVKIALKRLLKRKCC

SEQ ID NO: 325 - protein, 18 aa, synthetic construct
  source 1..18: note = C-terminal domain sequence
RNKEVKLALKRLLKRKCC

SEQ ID NO: 326 - protein, 18 aa, synthetic construct
  source 1..18: note = C-terminal domain sequence
RNKEVKMALKRLLKRKCC

SEQ ID NO: 327 - protein, 18 aa, synthetic construct
  source 1..18: note = C-terminal domain sequence
RNKEVKPALKRLLKRKCC

SEQ ID NO: 328 - protein, 18 aa, synthetic construct
  source 1..18: note = C-terminal domain sequence
RNKEVKSALKRLLKRKCC

SEQ ID NO: 329 - protein, 18 aa, synthetic construct
  source 1..18: note = C-terminal domain sequence
RNKEVKTALKRLLKRKCC

SEQ ID NO: 330 - protein, 18 aa, synthetic construct
  source 1..18: note = C-terminal domain sequence
RNKEVKWALKRLLKRKCC

SEQ ID NO: 331 - protein, 18 aa, synthetic construct
  source 1..18: note = C-terminal domain sequence
RNKEVKYALKRLLKRKCC

SEQ ID NO: 332 - DNA, 1106 bp, synthetic construct
  source 1..1106: mol_type = other DNA; note = mmLucy-FLAG-rho-OR1A1
ggatccgccaccatgagccaccagatcctgctgctcctggccctgctgaccctaggcctggctgattacaaggacgacgacgataagatcgaattgatgaacgggaccgagggcccaaacttctacgtgcctttctccaacaagacgggcgtggtggaattcatgagggaaaataaccagtcctctacactggaattcatcctcctgggagttactggtcagcaggaacaggaagatttcttctacatcctcttcttgttcatttaccccatcacattgattggaaacctgctcatcgtcctagccatttgctctgatgttcgccttcacaaccccatgtattttctccttgccaacctctccttggttgacatcttcttctcatcggtaaccatccctaagatgctggccaaccatctcttgggcagcaaatccatctcttttgggggatgcctaacgcagatgtatttcatgatagccttgggtaacacagacagctatattttggctgcaatggcatatgatcgagctgtggccatcagccgcccacttcactacacaacaattatgagtccacggtcttgtatctggcttattgctgggtcttgggtgattggaaatgccaatgccctcccccacactctgctcacagctagtctgtccttctgtggcaaccaggaagtggccaacttctactgtgacattacccccttgctgaagttatcctgttctgacatccactttcatgtgaagatgatgtacctaggggttggcattttctctgtgccattactatgcatcattgtctcctatattcgagtcttctccacagtcttccaggttccttccaccaagggcgtgctcaaggccttctccacctgtggttcccacctcacggttgtctctttgtattatggtacagtcatgggcacgtatttccgccctttgaccaattatagcctaaaagacgcagtgatcactgtaatgtacacggcagtgaccccaatgttaaatcctttcatctacagtctgaggaacaaagaagttaaaaaggccataaagaggttgttcaagagaaagtgctgcaggagaaggtgagcggccgc

SEQ ID NO: 333 - DNA, 1106 bp, synthetic construct
  source 1..1106: mol_type = other DNA; note = mmLucy-FLAG-rho-OR1A2
ggatccgccaccatgagccaccagatcctgctgctcctggccctgctgaccctaggcctggctgattacaaggacgacgacgataagatcgaattgatgaacgggaccgagggcccaaacttctacgtgcctttctccaacaagacgggcgtggtggaattcatgaagaaagaaaatcaatcctttaacctggattttattctcctgggagttactagtcagcaagaacagaataatgtcttctttgtgatttttttgtgcatttaccccatcacactgactggaaatctgctcatcatcttggccatctgtgctgacattcgccttcacaaccccatgtattttctccttgccaacctctccttggttgacatcatcttctcatccgtaaccatccctaaggtgctggccaaccatctcttggggagcaagttcatctcctttgggggatgcctaatgcagatgtatttcatgatagccttggccaaggcagacagctataccttggctgcaatggcatacgatcgagctgtggccatcagctgcccacttcattacacaacaattatgagtccacggtcttgtatcctgcttattgctgggtcttgggtgattggaaacaccagtgctctcccccacactctgctcacagctagtttgtccttctgtggcaaccaggaagtagccaatttctactgtgacattatgcctttgctgaagttgtcctgttctgacgtccactttaatgtgaagatgatgtacctaggggtcggcgttttctctttgccattactatgcatcattgtctcctatgttcaggtcttttccacagtcttccaagttccatctaccaagagtctattcaaagccttctgcacctgtggctcccacctcacagttgtttttttatattatggtacaacgatgggcatgtatttccgccctctgaccagttacagccccaaagatgcagtgataactgtgatgtatgtggcagtgaccccagcattaaatcctttcatctatagtctgaggaacaaagaagttaaaaaggccataaagaggttgttcaagagaaagtgctgcaggagaaggtgagcggccgc

SEQ ID NO: 334 - DNA, 1130 bp, synthetic construct
  source 1..1130: mol_type = other DNA; note = mmLucy-FLAG-rho-OR1B1(L149S,C263W)
ggatccgccaccatgagccaccagatcctgctgctcctggccctgctgaccctaggcctggctgattacaaggacgacgacgataagatcgaattgatgaacgggaccgagggcccaaacttctacgtgcctttctccaacaagacgggcgtggtggaattcatgatgagctttgcccctaatgcttcacactctccggtttttttgctccttgggttctcgagagctaacatctcctacactctcctcttcttcctgttcctggctatttacctgaccaccatactggggaatgtgacactggtgctgctcatctcctgggactccagactgcactcacccatgtattatctgcttcgtggcctctctgtgatagacatggggctatccacagttacactgccccagttgctggcccatttggtctctcattacccaaccattcctgctgcccgctgcttggctcagttctttttcttctatgcatttggggttacagatacacttgtcattgctgtcatggctctggatcgctatgtggccatctgtgaccccctgcactatgctttggtaatgaatcaccaacggtgtgcctgcttactagcctcgagctgggtggtgtccatactgcacaccatgttgcgtgtgggactcgtcctgcctctttgctggactggggatgctgggggcaacgttaaccttcctcacttcttttgtgaccaccggccacttctgcgagcctcttgttctgacatacattctaatgagctggccatattctttgagggtggcttccttatgctgggcccctgtgccctcattgtactctcttatgtccgaattggggccgctattctacgtttgccttcagctgctggtcgccgccgagcagtctccacctgtggatcccacctcaccatggttggtttcctctacggcaccatcatttgggtctacttccagcctcccttccagaactctcagtatcaggacatggtggcttcagtaatgtatactgccattacacctttggccaacccatttgtgtatagcctcaggaacaaagaagttaaaaaggccataaagaggttgttcaagagaaagtgctgcaggagaaggtgagcggccgc

SEQ ID NO: 335 - DNA, 1112 bp, synthetic construct
  source 1..1112: mol_type = other DNA; note = mmLucy-FLAG-rho-OR1C1
ggatccgccaccatgagccaccagatcctgctgctcctggccctgctgaccctaggcctggctgattacaaggacgacgacgataagatcgaattgatgaacgggaccgagggcccaaacttctacgtgcctttctccaacaagacgggcgtggtggaattcatggaaaaaagaaatctaacagttgtcagggaattcgtccttctgggacttcctagctcagcagagcagcagcacctcctgtctgtgctctttctctgtatgtatttagccaccaccttggggaacatgctcatcattgcgacgattggctttgactctcacctccattcccctatgtacttcttccttagtaacttggcctttgttgacatctgctttacgtcgactacagtcccccaaatggtagtgaatatcttgactggcaccaagactatctcttttgcaggctgcctcacccagctcttcttcttcgtttcttttgtgaatatggacagcctccttctgtgtgtgatggcgtatgatagatatgtggcgatttgccaccccttacattacaccgccagaatgaacctgtgcctttgtgtccagctagtggctggactgtggcttgttacttacctccacgccctcctgcatactgtcctaatagcacagctgtccttctgtgcctccaatatcatccatcatttcttctgtgatctcaatcctctcctgcagctctcttgctctgacgtctccttcaatgtaatgatcatttttgcagtaggaggtctattggctctcacgccccttgtctgtatcctcgtatcttatggacttatcttctccactgttctgaagatcacctctactcagggcaagcagagagctgtttccacctgcagctgccacctgtcagtggtggtgttgttttacggcacagccatcgccgtctatttcagcccttcatccccccatatgcctgagagcgacactctgtcaaccatcatgtattcaatggtggctccgatgctgaatcctttcatctataccctaaggaacaaagaagttaaaaaggccataaagaggttgttcaagagaaagtgctgcaggagaaggtgagcggccgc

SEQ ID NO: 336 - DNA, 1109 bp, synthetic construct
  source 1..1109: mol_type = other DNA; note = mmLucy-FLAG-rho-OR1D2
ggatccgccaccatgagccaccagatcctgctgctcctggccctgctgaccctaggcctggctgattacaaggacgacgacgataagatcgaattgatgaacgggaccgagggcccaaacttctacgtgcctttctccaacaagacgggcgtggtggaattcatggatggaggcaaccagagtgaaggttcagagttccttctcctggggatgtcagagagtcctgagcagcagcggatcctgttttggatgttcctgtccatgtacctggtcacggtggtgggaaatgtgctcatcatcctggccatcagctctgattcccgcctgcacacccccgtgtacttcttcctggccaacctctccttcactgacctcttctttgtcaccaacacaatccccaagatgctggtgaacctccagtcccataacaaagccatctcctatgcagggtgtctgacacagctctacttcctggtctccttggtggccctggacaacctcatcctggctgtgatggcatatgaccgctatgtggccatctgctgccccctccactacaccacagccatgagccctaagctctgtatcttactcctttccttgtgttgggtcctatccgtcctctatggcctcatacacaccctcctcatgaccagagtgaccttctgtgggtcacgaaaaatccactacatcttctgtgagatgtatgtattgctgaggatggcatgttccaacattcagattaatcacacagtgctgattgccacaggctgcttcatcttcctcattccctttggattcgtgatcatttcctatgtgctgattatcagagccatcctcagaataccctcagtctctaagaaatacaaagccttctccacctgtgcctcccatttgggtgcagtctccctcttctatgggacactttgtatggtatacctaaagcccctccatacctactctgtgaaggactcagtagccacagtgatgtatgctgtggtgacacccatgatgaatcccttcatctacagcctgaggaacaaagaagttaaaaaggccataaagaggttgttcaagagaaagtgctgcaggagaaggtgagcggccgc

SEQ ID NO: 337 - DNA, 1109 bp, synthetic construct
  source 1..1109: mol_type = other DNA; note = mmLucy-FLAG-rho-OR1D4(*172R)
ggatccgccaccatgagccaccagatcctgctgctcctggccctgctgaccctaggcctggctgattacaaggacgacgacgataagatcgaattgatgaacgggaccgagggcccaaacttctacgtgcctttctccaacaagacgggcgtggtggaattcatggatggagataaccagagtgagaactcacagttccttctcctggggatctcagagagtcctgagcagcagcagatcctgttttggatgttcctgtccatgtacctggtcacggtgctgggaaatgtgctcatcatcctggccatcagctctgattcccacctgcacacccccatgtacttcttcctggccaacctctccttcactgacctcttctttgtcaccaacacaatccccaagatgctggtgaacttccagtcccagaacaaagccatctcctatgcagggtgtctgacacagctctacttcctggtctccttggtgaccctggacaacctcatcctggccgtgatggcgtatgatcgctatgtggccatctgctgccccctccactatgtcacagccatgagccctgggctctgtgtcttgctcctctccttgtgttgggggctgtctgttctctatggcctcctcctcaccttcctcctgaccagggtgaccttctgtgggcctcgagagatccactacctcttctgtgacatgtacatcctgctgtggctggcatgttccaacacccacatcattcacacagtgttgattgccactggctgcttcatcttcctcacccccttagggttcatgaccacatcctatgtacgtattgtcagaaccatccttcaaatgccctcagcctctaagaaatacaaaaccttctctacctgtgcctcccatttgggtgtggtctccctcttttatgggatgcttgctatggtgtacctgcagcccctccatacctactccatgaaggactcagtagccacagtgatgtatgctgtgctgacacctatgatgaaccctttcatctacaggctgaggaacaaagaagttaaaaaggccataaagaggttgttcaagagaaagtgctgcaggagaaggtgagcggccgc

SEQ ID NO: 338 - DNA, 1109 bp, synthetic construct
  source 1..1109: mol_type = other DNA; note = mmLucy-FLAG-rho-OR1D5
ggatccgccaccatgagccaccagatcctgctgctcctggccctgctgaccctaggcctggctgattacaaggacgacgacgataagatcgaattgatgaacgggaccgagggcccaaacttctacgtgcctttctccaacaagacgggcgtggtggaattcatggatggagataaccagagtgagaactcacagttccttctcctggggatctcagagagtcctgagcagcagcggatcctgttttggatgttcctgtccatgtacctggtcacggtgctgggaaatgtgctcatcatcctggccatcagctctgattcccacctgcacacccccatgtacttcttcctggccaacctctccttcactgacctcttctttgtcaccaacacaatccccaagatgctggtgaacttccagtcccagaacaaagccatctcctatgcagggtgtctgacacagctctacttcctggtctccttggtgaccctggacaacctcatcctggccgtgatggcgtatgatcgctatgtggccacctgctgccccctccactatgtcacagccatgagccctgggctctgtgtcttgctcctctccttgtgttgggggctgtctgttctctatggcctcctcctcaccttcctcctgaccagggtgaccttctgtgggcctcgagagatccactacctcttctgtgacatgtacatcctgctgtggctggcatgttccaacacccacatcattcacacagcgttgattgccactggctgcttcatcttcctcacccccttagggttcatgaccacatcctatgtacgtattgtcagaaccatccttcaaatgccctcggcctctaagaaatacaaaaccttctctacctgtgcctcccatttgggtgtggtctccctcttttatgggacgcttgctatggtgtacctgcagcccctccatacctactccatgaaggactcagtagccacagtgatgtatgctgtgctgacacctatgatgaaccctttcatctacaggctgaggaacaaagaagttaaaaaggccataaagaggttgttcaagagaaagtgctgcaggagaaggtgagcggccgc

SEQ ID NO: 339 - DNA, 1112 bp, synthetic construct
  source 1..1112: mol_type = other DNA; note = mmLucy-FLAG-rho-OR1E1
ggatccgccaccatgagccaccagatcctgctgctcctggccctgctgaccctaggcctggctgattacaaggacgacgacgataagatcgaattgatgaacgggaccgagggcccaaacttctacgtgcctttctccaacaagacgggcgtggtggaattcatgatgggacaaaatcaaaccagcatctcagacttcctgctcctgggcctgcccatccaaccagagcagcaaaacctgtgctatgccctgttcttggccatgtatcttaccaccctcctggggaacctcctcatcattgtcctcattcgactggactcccatctccacacgcctatgtatttgtttctcagcaacttgtccttctctgacctctgcttctcttccgtgaccattcccaagttgttacagaacatgcagaaccaggacccatccatcccctatgcggactgcctgacccaaatgtacttcttcctgttatttggagacctggagagcttcctccttgtggccatggcctatgaccgctatgtggccatctgcttccccctgcactacaccgccatcatgagccccatgctctgtctcgccctggtggcgctgtcctgggtgctgaccaccttccatgccatgttacacactttactcatggccaggttgtgtttttgtgcagacaatgtgatcccccactttttctgtgatatgtctgctctgctgaagctggccttctctgacactcgagttaatgaatgggtgatatttatcatgggagggctcattcttgtcatcccattcctactcatccttgggtcctatgcaagaattgtctcctccatcctcaaggtcccttcttctaagggtatctgcaaggccttctctacttgtggctcccacctgtctgtggtgtcactgttctatggaaccgttattggtctctacttatgctcatcagctaatagttctactctaaaggacactgtcatggctatgatgtacactgtggtgacccccatgctgaaccccttcatctacagcctgaggaacaaagaagttaaaaaggccataaagaggttgttcaagagaaagtgctgcaggagaaggtgagcggccgc

SEQ ID NO: 340 - DNA, 1139 bp, synthetic construct
  source 1..1139: mol_type = other DNA; note = mmLucy-FLAG-rho-OR1E2
ggatccgccaccatgagccaccagatcctgctgctcctggccctgctgaccctaggcctggctgattacaaggacgacgacgataagatcgaattgatgaacgggaccgagggcccaaacttctacgtgcctttctccaacaagacgggcgtggtggaattcatgatgggacaaaatcaaaccagcatctcagacttcctgctcctgggcctgcccatccaaccagagcagcaaaacctgtgctatgccctgttcttggccatgtatcttaccaccctcctggggaacctcctcatcattgtcctcattcgactggactcccatctccacacgcctgtgtatttgtttctcagcaacttgtccttctctgacctctgcttttcctcagtcacaatgcccaaattgctgcagaacatgcagaaccaagacccatccatcccctatgcagactgcctgacccaaatgtacttcttcttgtatttttcggatctagagagcttcctccttgtggccatggcctatgaccgctatgtggccatctgcttccccatgcactacaccgccatctgcttcctcctgcactacaccgccatcatgagccccatgctctgtctctccgtggtggcgctgtcctgggtgctgaccaccttccatgccatgttacacactttactcatggccaggttgtgtttttgtgcagacaatgtgatcccccactttttctgtgatatgtctgctctgctgaagctggcctgctctgacactcgagttaatgaatgggtgatatttatcatgggagggctcattcttgtcatcccattcctactcatccttgggtcctatgcaagaattgtctcctccatcctcaaggtcccttcttctaagggtatctgcaaggccttctctacttgtggctcccacctctctgtggtgtcactgttctatgggaccgttattggtctctacttatgcccatcagctaatagttctactctaaaggacactgtcatggctatgatgtacactgtggtgacccctatgctgacccccttcatctacagcctgaggaacaaagaagttaaaaaggccataaagaggttgttcaagagaaagtgctgcaggagaaggtgagcggccgc

SEQ ID NO: 341 - DNA, 1112 bp, synthetic construct
  source 1..1112: mol_type = other DNA; note = mmLucy-FLAG-rho-OR1F1
ggatccgccaccatgagccaccagatcctgctgctcctggccctgctgaccctaggcctggctgattacaaggacgacgacgataagatcgaattgatgaacgggaccgagggcccaaacttctacgtgcctttctccaacaagacgggcgtggtggaattcatgagcgggacaaaccagtcgagtgtctccgagttcctcctcctgggactctccaggcagccccagcagcagcatctcctctttgtgttcttcctcagcatgtacctggccactgtcctggggaacctgctcatcatcctgtccgtaagcatagactcctgcctgcacacccccatgtacttcttcctcagcaacctgtcttttgtggacatctgcttctccttcaccaccgtccccaagatgctggccaatcacatactcgagactcagaccatctccttctgtggctgtctcacacagatgtatttcgttttcatgttcgtggacatggacaatttcctcctagctgtgatggcctatgaccactttgtcgccgtgtgccaccccttacattacacagcaaagatgacccatcagctctgtgccctgctggttgctggattatgggtggttgccaacctgaatgtccttctgcacaccctgctgatggctccactctcattctgtgcagacaatgccatcactcacttcttctgcgatgtgactcccctactgaaactctcctgctcagacacacacctcaatgaggtcataatccttagtgagggtgccctggtcatgatcaccccatttctttgcatcctggcttcttatatgcacatcacctgcactgtcctgaaggtcccatccacaaagggaaggtggaaagccttctccacctgtggttctcacctggctgtggttctcctcttctacagcaccatcattgctgtgtattttaaccctctgtcctcccactcagctgagaaagacactatggctactgtgttgtatacagtagtgactcccatgctaaaccctttcatctacagcctgaggaacaaagaagttaaaaaggccataaagaggttgttcaagagaaagtgctgcaggagaaggtgagcggccgc

SEQ ID NO: 342 - DNA, 1112 bp, synthetic construct
  source 1..1112: mol_type = other DNA; note = mmLucy-FLAG-rho-OR1F1(F75S)
ggatccgccaccatgagccaccagatcctgctgctcctggccctgctgaccctaggcctggctgattacaaggacgacgacgataagatcgaattgatgaacgggaccgagggcccaaacttctacgtgcctttctccaacaagacgggcgtggtggaattcatgagcgggacaaaccagtcgagtgtctccgagttcctcctcctgggactctccaggcagccccagcagcagcatctcctctttgtgttcttcctcagcatgtacctggccactgtcctggggaacctgctcatcatcctgtccgtaagcatagactcctgcctgcacacccccatgtacttcttcctcagcaacctgtcttttgtggacatctgcttctcctccaccaccgtccccaagatgctggccaatcacatactcgagactcagaccatctccttctgtggctgtctcacacagatgtatttcgttttcatgttcgtggacatggacaatttcctcctagctgtgatggcctatgaccactttgtcgccgtgtgccaccccttacattacacagcaaagatgacccatcagctctgtgccctgctggttgctggattatgggtggttgccaacctgaatgtccttctgcacaccctgctgatggctccactctcattctgtgcagacaatgccatcactcacttcttctgcgatgtgactcccctactgaaactctcctgctcagacacacacctcaatgaggtcataatccttagtgagggtgccctggtcatgatcaccccatttctttgcatcctggcttcttatatgcacatcacctgcactgtcctgaaggtcccatccacaaagggaaggtggaaagccttctccacctgtggttctcacctggctgtggttctcctcttctacagcaccatcattgctgtgtattttaaccctctgtcctcccactcagctgagaaagacactatggctactgtgttgtatacagtagtgactcccatgctaaaccctttcatctacagcctgaggaacaaagaagttaaaaaggccataaagaggttgttcaagagaaagtgctgcaggagaaggtgagcggccgc

SEQ ID NO: 343 - DNA, 1112 bp, synthetic construct
  source 1..1112: mol_type = other DNA; note = mmLucy-FLAG-rho-OR1F12
ggatccgccaccatgagccaccagatcctgctgctcctggccctgctgaccctaggcctggctgattacaaggacgacgacgataagatcgaattgatgaacgggaccgagggcccaaacttctacgtgcctttctccaacaagacgggcgtggtggaattcatggaagggaaaaatcaaaccaatatctctgaatttctcctcctgggcttctcaagttggcaacaacagcaggtgctactctttgcacttttcctgtgtctctatttaacagggctgtttggaaacttactcatcttgctggccattggctcggatcactgccttcacacacccatgtatttcttccttgccaatctgtccttggtagacctctgccttccctcagccacagtccccaagatgctactgaacatccaaacccaaacccaaaccatctcctatcccggctgcctggctcagatgtatttctgtatgatgtttgccaatatggacaattttcttctcacagtgatggcatatgaccgttacgtggccatctgtcaccctttacattactccaccattatggccctgcgcctctgtgcctctctggtagctgcaccttgggtcattgccattttgaaccctctcttgcacactcttatgatggcccatctgcacttctgctctgataatgttatccaccatttcttctgtgatatcaactctctcctccctctgtcctgttccgacaccagtcttaatcagttgagtgttctggctacggtggggctgatctttgtggtaccttcagtgtgtatcctggtatcctatatcctcattgtttctgctgtgatgaaagtcccttctgcccaaggaaaactcaaggctttctctacctgtggatctcaccttgccttggtcattcttttctatggagcaatcacaggggtctatatgagccccttatccaatcactctactgaaaaagactcagccgcatcagtcatttttatggttgtagcacctgtgttgaatccattcatttacagtttaaggaacaaagaagttaaaaaggccataaagaggttgttcaagagaaagtgctgcaggagaaggtgagcggccgc

SEQ ID NO: 344 - DNA, 1112 bp, synthetic construct
  source 1..1112: mol_type = other DNA; note = mmLucy-FLAG-rho-OR1G1
ggatccgccaccatgagccaccagatcctgctgctcctggccctgctgaccctaggcctggctgattacaaggacgacgacgataagatcgaattgatgaacgggaccgagggcccaaacttctacgtgcctttctccaacaagacgggcgtggtggaattcatggaggggaaaaatctgaccagcatctcagaatgtttcctcctggggttctctgagcagctggaggagcagaagcccctctttgggtccttcctgttcatgtacttggtcacggtggcaggcaacctcctcatcattctagtcatcattactgacactcaactccatacccccatgtacttctttctagccaacctctcccttgcagatgcctgctttgtgtccaccacagtccctaagatgctggcaaacatacagatccagagtcaggccatctcctactcagggtgtctactacagttgtattttttcatgttatttgtgatgctggaggcattcctcttggcggtcatggcctatgactgctacgtggccatatgccacccacttcattacattctgatcatgagccctgggctctgcatcttcctcgtgtctgcatcctggatcatgaatgccctccactcccttctacacacacttctgatgaacagcctgtccttctgcgcaaaccatgagatcccacacttcttctgtgacatcaatcccctcctgagtctgtcctgcacagaccccttcaccaatgagctggtgatcttcatcactgggggtctcacaggactcatttgtgtgctttgcctgattatctcttacacgaacgttttctcgaccatcctgaagatcccatcagctcaggggaagcggaaagccttttccacctgcagctctcatctctccgtggtctctctcttctttgggacttctttttgtgttgatttcagttctccctcaacccactcggcccagaaggacacagttgcatcagtgatgtacacagtggtaactccaatgttgaatccctttatctacagtttgaggaacaaagaagttaaaaaggccataaagaggttgttcaagagaaagtgctgcaggagaaggtgagcggccgc

SEQ ID NO: 345 - DNA, 1112 bp, synthetic construct
  source 1..1112: mol_type = other DNA; note = mmLucy-FLAG-rho-OR1I1
ggatccgccaccatgagccaccagatcctgctgctcctggccctgctgaccctaggcctggctgattacaaggacgacgacgataagatcgaattgatgaacgggaccgagggcccaaacttctacgtgcctttctccaacaagacgggcgtggtggaattcatggaaccagaaaagcaaaccgaaatctcagaattcttcctccagggactctcagaaaagccagagcatcagaccctcctcttcacaatgttcctctccacatacctggtcaccatcattggaaatgccctcattatcctggccatcatcacggactctcacctccacacacccatgtacttctttctcttcaacctctcactcgttgacaccctattatcctccaccaccgtccccaagatgctagcgaacatccaggctcagagcagagccatcccctttgtgggctgcctcacccagatgtatgccttccacctgttcgggaccatggacagctttctcctggcagtaatggccatcgaccgcttcgtggccattgtccacccacagcgttacttggttctcatgtgctcccctgtctgtgggctgctgctgggagcatcatggatgatcaccaacctccagtctctcatacacacctgcctcatggctcaactgaccttctgcgccggctctgaaatctcccacttcttctgtgacctcatgcccctgctgaagctctccggctcagacacgcacaccaacgagctggtgatctttgcttttggcattgtcgtgggcaccagcccattctcctgcatccttctctcgtacatccgcattttctggacagtctttaagatcccttctactcggggcaagtggaaagccttctccacctgtggcttacacctcactgtggtgtcactgtcctatgggaccatctttgctgtgtacttacagcccacatcccccagctcctcccagaaggacaaggcagccgccctaatgtgtggggtgttcatccccatgctcaacccctttatctacagcataaggaacaaagaagttaaaaaggccataaagaggttgttcaagagaaagtgctgcaggagaaggtgagcggccgc

SEQ ID NO: 346 - DNA, 1112 bp, synthetic construct
  source 1..1112: mol_type = other DNA; note = mmLucy-FLAG-rho-OR1I1(P139R,F211L,Y252S)
ggatccgccaccatgagccaccagatcctgctgctcctggccctgctgaccctaggcctggctgattacaaggacgacgacgataagatcgaattgatgaacgggaccgagggcccaaacttctacgtgcctttctccaacaagacgggcgtggtggaattcatggaaccagaaaagcaaaccgaaatctcagaattcttcctccagggactctcagaaaagccagagcatcagaccctcctcttcacaatgttcctctccacatacctggtcaccatcattggaaatgccctcattatcctggccatcatcacggactctcacctccacacacccatgtacttctttctcttcaacctctcactcgttgacaccctattatcctccaccaccgtccccaagatgctagcgaacatccaggctcagagcagagccatcccctttgtgggctgcctcacccagatgtatgccttccacctgttcgggaccatggacagctttctcctggcagtaatggccatcgaccgcttcgtggccattgtccacccacagcgttacttggttctcatgtgctcccgtgtctgtgggctgctgctgggagcatcatggatgatcaccaacctccagtctctcatacacacctgcctcatggctcaactgaccttctgcgccggctctgaaatctcccacttcttctgtgacctcatgcccctgctgaagctctccggctcagacacgcacaccaacgagctggtgatctttgcttttggcattgtcgtgggcaccagcccactctcctgcatccttctctcgtacatccgcattttctggacagtctttaagatcccttctactcggggcaagtggaaagccttctccacctgtggcttacacctcactgtggtgtcactgtcctctgggaccatctttgctgtgtacttacagcccacatcccccagctcctcccagaaggacaaggcagccgccctaatgtgtggggtgttcatccccatgctcaacccctttatctacagcataaggaacaaagaagttaaaaaggccataaagaggttgttcaagagaaagtgctgcaggagaaggtgagcggccgc

SEQ ID NO: 347 - DNA, 1112 bp, synthetic construct
  source 1..1112: mol_type = other DNA; note = mmLucy-FLAG-rho-OR1J1
ggatccgccaccatgagccaccagatcctgctgctcctggccctgctgaccctaggcctggctgattacaaggacgacgacgataagatcgaattgatgaacgggaccgagggcccaaacttctacgtgcctttctccaacaagacgggcgtggtggaattcatgagccctgagaaccagagcagcgtgtccgagttcctcctcctgggcctccccatccggccagagcagcaggccgtgttcttcgccctgttcctgggcatgtacctgaccacggtgctggggaacctgctcatcatgctgctcatccagctagactctcaccttcacacccccatgtacttcttccttagccacttggccctcactgacatctccttttcatctgtcactgtccctaagatgctgatgaacatgcagactcagcacctagccgtcttttacaagggatgcatttcacagacatattttttcatattttttgctgacttagacagtttccttatcacttcaatggcatatgacaggtatgtggccatctgtcatcctctacattatgccaccatcatgactcagagccagtgtgtcatgctggtggctgggtcctgggtcatcgcttgtgcgtgtgctcttttgcataccctcctcctggcccagctttccttctgtgctgaccacatcatccctcactacttctgtgaccttggtgccctgctcaagttgtcctgctcagacacctccctcaatcagttagcaatctttacagcagcattgacagccattatgcttccattcctgtgcatcctggtttcttatggtcacattggggtcaccatcctccagattccctctaccaagggcatatgcaaagccttgtccacttgtggatcccacctctcagtggtgactatctattatcggacaattattggtctctattttcttcccccatccagcaacaccaatgacaagaacataattgcttcagtgatatacacagcagtcactcccatgttgaacccattcatttacagtctgaggaacaaagaagttaaaaaggccataaagaggttgttcaagagaaagtgctgcaggagaaggtgagcggccgc

SEQ ID NO: 348 - DNA, 1112 bp, synthetic construct
  source 1..1112: mol_type = other DNA; note = mmLucy-FLAG-rho-OR1J2
ggatccgccaccatgagccaccagatcctgctgctcctggccctgctgaccctaggcctggctgattacaaggacgacgacgataagatcgaattgatgaacgggaccgagggcccaaacttctacgtgcctttctccaacaagacgggcgtggtggaattcatgagccctgagaaccagagcagcgtgtccgagttcctccttctgggcctccccatccggccagagcagcaggctgtgttcttcaccctgttcctgggcatgtacctgaccacggtgctggggaacctgctcatcatgctgctcatccagctggactctcaccttcacacccccatgtacttcttcctcagccacttggctctcactgacatctccttttcatctgtcactgtccctaagatgctgatggacatgcggactaagtacaaatcgatcctctatgaggaatgcatttctcagatgtatttttttatattttttactgacctggacagcttccttattacatcaatggcatatgaccgatatgttgccatatgtcaccctctccactacactgtcatcatgagggaagagctctgtgtcttcttagtggctgtatcttggattctgtcttgtgccagctccctctctcacacccttctcctgacccggctgtctttctgtgctgcgaacaccatcccccatgtcttctgtgaccttgctgccctgctcaagctgtcctgctcagatatcttcctcaatgagctggtcatgttcacagtaggggtggtggtcattaccctgccattcatgtgtatcctggtatcatatggctacattggggccaccatcctgagggtcccttcaaccaaagggatccacaaagcattgtccacatgtggctcccatctctctgtggtgtctctctattatgggtcaatatttggccagtaccttttcccgactgtaagcagttctattgacaaggatgtcattgtggctctcatgtacacggtggtcacacccatgttgaacccctttatctacagccttaggaacaaagaagttaaaaaggccataaagaggttgttcaagagaaagtgctgcaggagaaggtgagcggccgc

SEQ ID NO: 349 - DNA, 1112 bp, synthetic construct
  source 1..1112: mol_type = other DNA; note = mmLucy-FLAG-rho-OR1J4
ggatccgccaccatgagccaccagatcctgctgctcctggccctgctgaccctaggcctggctgattacaaggacgacgacgataagatcgaattgatgaacgggaccgagggcccaaacttctacgtgcctttctccaacaagacgggcgtggtggaattcatgaagagggagaatcagagcagtgtgtctgagttcctcctcctggacctccccatctggccagagcagcaggctgtgttcttcaccctgttcttgggcatgtacctgatcacggtgctggggaacctgctcatcatcctgctcatccggctggactctcaccttcacacccccatgttcttcttcctcagccacttggctctcactgacatctccctttcatctgtcactgtcccaaagatgttattaagcatgcaaactcaggatcaatccattctttatgcagggtgtgtaactcagatgtattttttcatatttttcactgatctagacaatttccttctcacttcaatggcatacgatcggtatgtggccatctgtcaccccctccgctacaccactatcatgaaagagggactgtgtaacttactagtcactgtgtcctggatcctctcctgtaccaatgccctgtctcacactctcctcctggcccagctgtccttttgtgctgacaacaccatcccccatttcttctgtgatcttgttgccctactcaagctctcatgctcagacatctccctcaatgagctggtcattttcacagtgggacaggcagtcattactctaccactaatatgcatcttgatctcttatggccacattggggtcaccatcctcaaggctccatctactaagggcatcttcaaagctttgtccacctgtggctctcacctctctgtggtgtctctgtattatggcacaattattggactgtattttctcccctcatccagtgcctccagtgacaaggacgtaattgcctctgtgatgtacacggtgatcaccccattgctgaatcccttcatttatagcctaaggaacaaagaagttaaaaaggccataaagaggttgttcaagagaaagtgctgcaggagaaggtgagcggccgc

SEQ ID NO: 350 - DNA, 1115 bp, synthetic construct
  source 1..1115: mol_type = other DNA; note = mmLucy-FLAG-rho-OR1K1
ggatccgccaccatgagccaccagatcctgctgctcctggccctgctgaccctaggcctggctgattacaaggacgacgacgataagatcgaattgatgaacgggaccgagggcccaaacttctacgtgcctttctccaacaagacgggcgtggtggaattcatggaggctgccaatgagtcttcagagggaatctcattcgttttattgggactgacaacaagtcctggacagcagcggcctctctttgtgctgttcttgctcttgtatgtggccagcctcctgggtaatggactcattgtggctgccatccaggccagtccagcccttcatgcacccatgtacttcctgctggcccacctgtcctttgctgacctctgcttcgcctccgtcactgtgcccaagatgttggccaacttgttggcccatgaccactccatctcgctggctggctgcctgacccaaatgtacttcttctttgccctgggggtaactgatagctgtcttctggcggccatggcctatgactgctacgtggccatccggcaccccctcccctatgccacgaggatgtcccgggccatgtgcgcagccctggtgggaatggcatggctggtgtcccacgtccactccctcctgtatatcctgctcatggctcgcttgtccttctgtgcttcccaccaagtgccccacttcttctgtgaccaccagcctctcttaaggctctcgtgctctgacacccaccacatccagctgctcatcttcaccgagggcgccgcagtggtggtcactcccttcctgctcatcctcgcctcctatggggccatcgcagctgccgtgctccagctgccctcagcctctgggaggctccgggctgtgtccacctgtggctcccacctggctgtggtgagcctcttctatgggacagtcattgcagtctacttccaggccacatcccgacgcgaggcagagtggggccgtgtggccactgtcatgtacactgtagtcacccccatgctgaaccccatcatctacagcctcaggaacaaagaagttaaaaaggccataaagaggttgttcaagagaaagtgctgcaggagaaggtgagcggccgc

SEQ ID NO: 351 - DNA, 1109 bp, synthetic construct
  source 1..1109: mol_type = other DNA; note = mmLucy-FLAG-rho-OR1L1
ggatccgccaccatgagccaccagatcctgctgctcctggccctgctgaccctaggcctggctgattacaaggacgacgacgataagatcgaattgatgaacgggaccgagggcccaaacttctacgtgcctttctccaacaagacgggcgtggtggaattcatgggaagaaataacctaacaagaccctctgaattcatcctccttggactctcctctcgacctgaggatcagaagccgctctttgctgtgttcctccccatctaccttatcacagtgataggaaacctgcttatcatcctggccatccgctcagacactcgtctccagacgcccatgtacttctttctaagcatcctgtcttttgttgacatttgctatgtgacagtcattatccctaagatgctggtgaacttcttatcagagacaaagaccatctcttacagtgagtgtctgacccagatgtactttttcttagcctttggaaacacagacagttacctgctagcagccatggccattgaccgctatgtggccatatgtaatcccttccactacatcaccattatgagtcacagatgctgtgtcctgcttctggttctctccttctgcattccacattttcactccctcctgcacattcttctgactaatcagctcatcttctgtgcctcaaatgtcatccatcactttttctgcgatgatcaaccagtgctaaaattgtcctgttcctcccattttgtcaaagaaatcacagtaatgacagaaggcttggctgtcataatgaccccgttttcatgcatcatcatctcttatttaagaatcctcatcactgttctgaagattccttcagctgctggaaagcgtaaagcattttctacctgtggctctcatctcacagtggtgaccctgttttatggaagcattagctatctctattttcagcccctgtccaactatactgtcaaggatcaaatagcaacaattatctacaccgtactgactcctatgctaaatccatttatctatagtctgaggaacaaagaagttaaaaaggccataaagaggttgttcaagagaaagtgctgcaggagaaggtgagcggccgc

SEQ ID NO: 352 - DNA, 1109 bp, synthetic construct
  source 1..1109: mol_type = other DNA; note = mmLucy-FLAG-rho-OR1L3
ggatccgccaccatgagccaccagatcctgctgctcctggccctgctgaccctaggcctggctgattacaaggacgacgacgataagatcgaattgatgaacgggaccgagggcccaaacttctacgtgcctttctccaacaagacgggcgtggtggaattcatgggaatgtccaacctgacaagactctctgaatttattctcttgggactctcctctcggtctgaagaccagaggccactctttgccctctttcttatcatatacctggtcactttgatgggaaatctgctcatcatcttggctatccactctgatcctcgacttcaaaaccctatgtattttttcctaagcatcttgtcctttgctgatatttgctacacaacagtcatagtcccaaagatgctcgtgaacttcttatcagagaaaaagaccatttcctatgctgaatgtctggcacagatgtatttcttcctggtttttggaaacatagatagttatctcctggcggctatggccatcaaccgctgtgtagccatttgtaacccattccattatgtcactgttatgaaccgcagatgctgtgtgttgctactagcattccccatcactttctcctatttccactctctcctacatgtcctcctggtgaatcggctcaccttttgtacatcaaatgttatccatcattttttttgtgatgtcaaccctgtgctgaaactgtcctgctcctccacctttgtcaatgaaattgtggccatgacagaagggctggcctctgtgatggctccatttgtctgtatcatcatctcttatctaagaattctcatcgctgttctcaagattccctcagcagctggaaaacacaaagccttctccacctgcagctcccatctcactgtggtgattctgttttatgggagtattagctatgtctatttgcagcctttgtccagctatactgtcaaggaccgaatagcaacaatcaactacactgtgttgacatcagtgttgaacccatttatctacagtttaaggaacaaagaagttaaaaaggccataaagaggttgttcaagagaaagtgctgcaggagaaggtgagcggccgc

SEQ ID NO: 353 - DNA, 1115 bp, synthetic construct
  source 1..1115: mol_type = other DNA; note = mmLucy-FLAG-rho-OR1L4
ggatccgccaccatgagccaccagatcctgctgctcctggccctgctgaccctaggcctggctgattacaaggacgacgacgataagatcgaattgatgaacgggaccgagggcccaaacttctacgtgcctttctccaacaagacgggcgtggtggaattcatggagacaaagaattatagcagcagcacctcaggcttcatcctcctgggcctctcttccaaccctaagctgcagaaacctctctttgccatcttcctcatcatgtacctactcactgcggtggggaatgtgctcatcatcctggccatctactctgaccccaggctccacacccctatgtacttttttctcagcaacttgtctttcatggatatctgcttcacaacagtcatagtgcctaagatgctggtgaattttctatcagagacaaagattatctcttatgtgggctgcctgatccagatgtacttcttcatggcatttgggaacactgacagctacctgctggcctctatggccatcgaccggctggtggccatctgcaaccccttacactatgatgtggttatgaaaccatggcattgcctactcatgctattgggttcttgcagcatctcccacctacattccctgttccgcgtgctacttatgtctcgcttgtctttctgtgcctctcacatcattaagcactttttctgtgacacccagcctgtgctaaagctctcctgctctgacacatcctccagccagatggtggtgatgactgagaccttagctgtcattgtgacccccttcctgtgtaccatcttctcctacctgcaaatcatcgtcactgtgctcagaatcccctctgcagccgggaagtggaaggccttctctacctgtggctcccacctcactgtagtggtcctgttctatgggagtgtcatctatgtctattttaggcctctgtccatgtactcagtgatgaagggccgggtagccacagttatgtacacagtagtgacacccatgctgaaccctttcatctacagcctgaggaacaaagaagttaaaaaggccataaagaggttgttcaagagaaagtgctgcaggagaaggtgagcggccgc

SEQ ID NO: 354 - DNA, 1115 bp, synthetic construct
  source 1..1115: mol_type = other DNA; note = mmLucy-FLAG-rho-OR1L6
ggatccgccaccatgagccaccagatcctgctgctcctggccctgctgaccctaggcctggctgattacaaggacgacgacgataagatcgaattgatgaacgggaccgagggcccaaacttctacgtgcctttctccaacaagacgggcgtggtggaattcatggagataaagaactacagcagcagcacctcaggcttcatcctcctgggcctctcttccaaccctaagctgcagaaacctctctttgccatcttcctcatcatgtacctgctcgctgcggtggggaatgtgctcatcatcccggccatctactctgaccccaggctccacacccctatgtacttttttctcagcaacttgtctttcatggatatctgcttcacaacagtcatagtgcctaagatgctggtgaattttctatcagagacaaaggttatctcctatgtgggctgcctggcccagatgtacttctttatggcatttgggaacactgacagctacctgctggcctctatggccatcgaccggctggtggccatctgcaaccccttacactatgatgtggttatgaaaccacggcattgcctgctcatgctattgggttcttacagcatctcccacctacattccctgttccgcgtgctacttatgtctcgcttgtctttctgtgcctctcacatcattaagcactttttctgtgacacccagcctgtgctaaagctctcctgctctgacacatcctccagccagatggtggtgatgactgagaccttagctgtcattgtgacccccttcctgtgtaccatcttctcctacctgcaaatcatcgtcactgtgctcagaatcccctctgcagccaggaagtggaaggccttctctacctgtggctcccacctcactgcagtagcccttttctatgggagtattatttatgtctattttaggcccctgtccatgtactcagtggttagggaccgggtagccacagttatgtacacagtagtgacacccatgctgaaccctttcatctacagcctgaggaacaaagaagttaaaaaggccataaagaggttgttcaagagaaagtgctgcaggagaaggtgagcggccgc

SEQ ID NO: 355 - DNA, 1112 bp, synthetic construct
  source 1..1112: mol_type = other DNA; note = mmLucy-FLAG-rho-OR1L8
ggatccgccaccatgagccaccagatcctgctgctcctggccctgctgaccctaggcctggctgattacaaggacgacgacgataagatcgaattgatgaacgggaccgagggcccaaacttctacgtgcctttctccaacaagacgggcgtggtggaattcatggaaagaatcaaccacaccagcagtgtctccgagtttatcctcctgggactctcctcccggcctgaggaccaaaagacactctttgttctcttcctcatcgtgtacctggtcaccataacagggaacctgctcatcatcctggccattcgcttcaacccccatcttcagacccctatgtatttcttcttgagttttctgtctctcactgatatttgctttacaacaagcgttgtccccaagatgctgatgaacttcctgtcagaaaagaagaccatctcctatgctgggtgtctgacacagatgtattttctctatgccttgggcaacagtgacagctgccttctggcagtcatggcctttgaccgctatgtggccgtctgtgaccctttccactatgtcaccaccatgagccaccaccactgtgtcctgctggtggccttctcctgctcatttcctcacctccactcactcctgcacacacttctgctgaatcgtctcaccttctgtgactccaatgttatccaccactttctctgtgacctcagccctgtgctgaaattgtcctgctcttccatatttgtcaatgaaattgtgcagatgacagaagcacctattgttttggtgactcgttttctctgcattgctttctcttatatacgaatcctcactacagttctcaagattccctctacttctgggaaacgcaaagccttctccacctgtggtttttacctcaccgtggtgacgctcttttatggaagcatcttctgtgtctatttacagcccccatccacctacgctgtcaaggaccacgtggcaacaattgtttacacagttttgtcatccatgctcaatccttttatctacagcctgaggaacaaagaagttaaaaaggccataaagaggttgttcaagagaaagtgctgcaggagaaggtgagcggccgc

SEQ ID NO: 356 - DNA, 1112 bp, synthetic construct
  source 1..1112: mol_type = other DNA; note = mmLucy-FLAG-rho-OR1L8(T27P,R211P)
ggatccgccaccatgagccaccagatcctgctgctcctggccctgctgaccctaggcctggctgattacaaggacgacgacgataagatcgaattgatgaacgggaccgagggcccaaacttctacgtgcctttctccaacaagacgggcgtggtggaattcatggaaagaatcaaccacaccagcagtgtctccgagtttatcctcctgggactctcctcccggcctgaggaccaaaagccactctttgttctcttcctcatcgtgtacctggtcaccataacagggaacctgctcatcatcctggccattcgcttcaacccccatcttcagacccctatgtatttcttcttgagttttctgtctctcactgatatttgctttacaacaagcgttgtccccaagatgctgatgaacttcctgtcagaaaagaagaccatctcctatgctgggtgtctgacacagatgtattttctctatgccttgggcaacagtgacagctgccttctggcagtcatggcctttgaccgctatgtggccgtctgtgaccctttccactatgtcaccaccatgagccaccaccactgtgtcctgctggtggccttctcctgctcatttcctcacctccactcactcctgcacacacttctgctgaatcgtctcaccttctgtgactccaatgttatccaccactttctctgtgacctcagccctgtgctgaaattgtcctgctcttccatatttgtcaatgaaattgtgcagatgacagaagcacctattgttttggtgactccttttctctgcattgctttctcttatatacgaatcctcactacagttctcaagattccctctacttctgggaaacgcaaagccttctccacctgtggtttttacctcaccgtggtgacgctcttttatggaagcatcttctgtgtctatttacagcccccatccacctacgctgtcaaggaccacgtggcaacaattgtttacacagttttgtcatccatgctcaatccttttatctacagcctgaggaacaaagaagttaaaaaggccataaagaggttgttcaagagaaagtgctgcaggagaaggtgagcggccgc

SEQ ID NO: 357 - DNA, 1112 bp, synthetic construct
  source 1..1112: mol_type = other DNA; note = mmLucy-FLAG-rho-OR1M1
ggatccgccaccatgagccaccagatcctgctgctcctggccctgctgaccctaggcctggctgattacaaggacgacgacgataagatcgaattgatgaacgggaccgagggcccaaacttctacgtgcctttctccaacaagacgggcgtggtggaattcatggaaccaagaaaccaaaccagtgcatctcaattcatcctcctgggactctcagaaaagccagagcaggagacgcttctcttttccctgttcttctgcatgtacctggtcatggtcgtggggaacctgctcatcatcctggccatcagcatagactcccacctccacacccccatgtacttcttcctggccaacctgtccctggttgatttctgtctggccaccaacaccatccctaagatgctggtgagccttcaaaccgggagcaaggccatctcttatccctgctgcctgatccagatgtacttcttccatttctttggcatcgtggacagcgtcataatcgccatgatggcttatgaccggttcgtggccatctgccacccattgcactacgccaagatcatgagcctacgcctctgtcgcctgctggtcggcgccctctgggcgttttcctgcttcatctcactcactcacatcctcctgatggcccgtctcgttttctgcggcagccatgaggtgcctcactacttctgcgacctcactcccatcctccgactttcgtgcacggacacctctgtgaataggatcttcatcctcattgtggcagggatggtgatagccacgccctttgtctgcatcctggcctcctatgctcgcatccttgtggccatcatgaaggtcccctctgcaggcggcaggaagaaagccttctccacctgcagctcccacctgtctgtggttgctctcttctatgggaccaccattggcgtctatctgtgtccctcctcggtcctcaccactgtgaaggagaaagcttctgcggtgatgtacacagcagtcacccccatgctgaatcccttcatctacagcttgaggaacaaagaagttaaaaaggccataaagaggttgttcaagagaaagtgctgcaggagaaggtgagcggccgc

SEQ ID NO: 358 - DNA, 1106 bp, synthetic construct
  source 1..1106: mol_type = other DNA; note = mmLucy-FLAG-rho-OR1N1
ggatccgccaccatgagccaccagatcctgctgctcctggccctgctgaccctaggcctggctgattacaaggacgacgacgataagatcgaattgatgaacgggaccgagggcccaaacttctacgtgcctttctccaacaagacgggcgtggtggaattcatggaaaaccaatccagcatttctgaatttttcctccgaggaatatcagcgcctccagagcaacagcagtccctcttcggaattttcctgtgtatgtatcttgtcaccttgactgggaacctgctcatcatcctggccattggctctgacctgcacctccacacccccatgtactttttcttggccaacctgtcttttgttgacatgggtttaacgtcctccacagttaccaagatgctggtgaatatacagactcggcatcacaccatctcctatacgggttgcctcacgcaaatgtatttctttctgatgtttggtgatctagacagcttcttcctggctgccatggcgtatgaccgctatgtggccatttgccaccccctctgctactccacagtcatgaggccccaagtctgtgccctaatgcttgcattgtgctgggtcctcaccaatatcgttgccctgactcacacgttcctcatggctcggttgtccttctgtgtgactggggaaattgctcactttttctgtgacatcactcctgtcctgaagctgtcatgttctgacacccacatcaacgagatgatggtttttgtcttgggaggcaccgtactcatcgtcccctttttatgcattgtcacctcctacatccacattgtgccagctatcctgagggtccgaacccgtggtggggtgggcaaggccttttccacctgcagttcccacctctgcgttgtttgtgtgttctatgggaccctcttcagtgcctacctgtgtcctccctccattgcctctgaagagaaggacattgcagcagctgcaatgtacaccatagtgactcccatgttgaacccctttatctatagcctaaggaacaaagaagttaaaaaggccataaagaggttgttcaagagaaagtgctgcaggagaaggtgagcggccgc

SEQ ID NO: 359 - DNA, 1121 bp, synthetic construct
  source 1..1121: mol_type = other DNA; note = mmLucy-FLAG-rho-OR1N2(W23R,V230G,T287M)
ggatccgccaccatgagccaccagatcctgctgctcctggccctgctgaccctaggcctggctgattacaaggacgacgacgataagatcgaattgatgaacgggaccgagggcccaaacttctacgtgcctttctccaacaagacgggcgtggtggaattcatgggaaaaccaggcagagtgaaccaaaccactgtttcagacttcctccttttaggactctctgagcggccagaggagcagcctcttctgtttggcatcttccttggcatgtacctggtcaccatggtggggaacctgctcattatcctggccatcagctctgacccacacctccatactcccatgtacttctttctggccaacctgtcattaactgatgcctgtttcacttctgcctccatccccaaaatgctggccaacattcatacccagagtcagatcatctcctattctgggtgtcttgcacagctatatttcctccttatgtttggtggccttgacaactgcctgctggctgtgatggcatatgaccgctatgtggccatctgccaaccactccattacagcacatctatgagtccccagctctgtgcactaatgctgggtgtgtgctgggtgctaaccaactgtcctgccctgatgcacacactgttgctgacccgcgtggctttctgtgcccagaaagccatccctcatttctactgtgatcccagtgctctcctgaagcttgcctgctcagatacccatgtaaacgagctgatgatcatcaccatgggcttgctgttcctcactgttcccctcctgctgatcgtcttctcctatgtccgcattttctgggctgtgtttggcatctcatctcctggagggagatggaaggccttctctacctgtggttctcatctcacggtggttctgctcttctatgggtctcttatgggtgtgtatttacttcctccatcaacttactctacagagagggaaagtagggctgctgttctctatatggtgattattcccatgctaaacccattcatttatagcttgaggaacaaagaagttaaaaaggccataaagaggttgttcaagagaaagtgctgcaggagaaggtgagcggccgc

SEQ ID NO: 360 - DNA, 1112 bp, synthetic construct
  source 1..1112: mol_type = other DNA; note = mmLucy-FLAG-rho-OR1Q1(Q24R)
ggatccgccaccatgagccaccagatcctgctgctcctggccctgctgaccctaggcctggctgattacaaggacgacgacgataagatcgaattgatgaacgggaccgagggcccaaacttctacgtgcctttctccaacaagacgggcgtggtggaattcatggacaacagcaactggaccagtgtgtcccattttgttctcttgggcatttccacccacccagaagagcgaatcccactcttccttgttttctcactcatgtacgcaatcaatatttctggcaacttggccatcatcacactgattctctctgctccacgcctccacatccccatgtacatcttcctcagtaacttggccttgacagacatctgcttcacctccaccacggtccccaagatgctgcagattattttctcccctacaaaggtaatttcctacacaggctgtttagcccaaacttatttcttcatttgcttcgccgtcatggaaaacttcatcctggctgtgatggcctatgacaggtacattgccatctgccaccctttccactacactatgatcctgactagaatgctgtgtgtgaagatggtggtcatgtgccatgctctctcccaccttcatgccatgctgcatacctttctcataggccaactaatcttctgtgcagataacagaatcccccacttcttctgtgacctctacgctctgatgaagatctcctgcaccagcacctacctcaacacccttatgattcacacagaaggtgctgttgtaatcagtggagctctggccttcattactgcctcctatgcctgcatcatcctggtggtcctccggatcccctcagccaagggcaggtggaaaaccttttctacctgcggctcccacctcactgtggtggccatattctatggcaccctcagttgggtctacttccggcccctttccagctattcagtgaccaagggtcgcattataacagtcgtgtacacagtggtgactcccatgctgaaccccttcatctacagcctgaggaacaaagaagttaaaaaggccataaagaggttgttcaagagaaagtgctgcaggagaaggtgagcggccgc

SEQ ID NO: 361 - DNA, 1112 bp, synthetic construct
  source 1..1112: mol_type = other DNA; note = mmLucy-FLAG-rho-OR1S1
ggatccgccaccatgagccaccagatcctgctgctcctggccctgctgaccctaggcctggctgattacaaggacgacgacgataagatcgaattgatgaacgggaccgagggcccaaacttctacgtgcctttctccaacaagacgggcgtggtggaattcatgcatcaaggaaaccaaaccaccatcactgaattcattctcctgggatttttcaagcaggatgagcatcaaaacctcctctttgtgcttttcttgggtatgtacctggtcactgtgattgggaacgggctcatcattgtggctatcagcttggatacgtaccttcatacccccatgtatctcttccttgccaatctatcctttgctgatatttcctccatttccaactcagtccccaaaatgctggtgaatattcaaaccaagagtcaatccatctcttatgagagctgcatcacacagatgtacttttctattgtgtttgtcgtcattgacaatttgctcttggggaccatggcctatgaccactttgtggcgatctgccaccctctgaattatacaattctcatgcggcccaggttcggcattttgctcacagtcatctcatggttcctcagtaatattattgctctgacacacacccttctgctcattcaattgctcttctgtaaccacaacactctcccacacttcttctgtgacttggcccctctgctcaaactgtcctgttcagatacattgatcaatgagcttgtgttgtttattgtgggtttatcagttatcatcttcccctttacactcagcttcttttcctatgtctgcatcatcagagctgtcctgagagtatcttccacacagggaaagtggaaagccttctccacttgtggctctcacctgacagttgtattactgttctacggaaccattgtaggcgtgtactttttcccctcctccactcaccctgaggacactgataagattggtgctgtcctattcactgtggtgacacccatgataaaccccttcatctacagcttgaggaacaaagaagttaaaaaggccataaagaggttgttcaagagaaagtgctgcaggagaaggtgagcggccgc

SEQ ID NO: 362 - DNA, 1112 bp, synthetic construct
  source 1..1112: mol_type = other DNA; note = mmLucy-FLAG-rho-OR1S1(I110T,H122R,N170D,S214I)
ggatccgccaccatgagccaccagatcctgctgctcctggccctgctgaccctaggcctggctgattacaaggacgacgacgataagatcgaattgatgaacgggaccgagggcccaaacttctacgtgcctttctccaacaagacgggcgtggtggaattcatgcatcaaggaaaccaaaccaccatcactgaattcattctcctgggatttttcaagcaggatgagcatcaaaacctcctctttgtgcttttcttgggtatgtacctggtcactgtgattgggaacgggctcatcattgtggctatcagcttggatacgtaccttcatacccccatgtatctcttccttgccaatctatcctttgctgatatttcctccatttccaactcagtccccaaaatgctggtgaatattcaaaccaagagtcaatccatctcttatgagagctgcatcacacagatgtacttttctattgtgtttgtcgtcactgacaatttgctcttggggaccatggcctatgaccgctttgtggcgatctgccaccctctgaattatacaattctcatgcggcccaggttcggcattttgctcacagtcatctcatggttcctcagtaatattattgctctgacacacacccttctgctcattcaattgctcttctgtgaccacaacactctcccacacttcttctgtgacttggcccctctgctcaaactgtcctgttcagatacattgatcaatgagcttgtgttgtttattgtgggtttatcagttatcatcttcccctttacactcatcttcttttcctatgtctgcatcatcagagctgtcctgagagtatcttccacacagggaaagtggaaagccttctccacttgtggctctcacctgacagttgtattactgttctacggaaccattgtaggcgtgtactttttcccctcctccactcaccctgaggacactgataagattggtgctgtcctattcactgtggtgacacccatgataaaccccttcatctacagcttgaggaacaaagaagttaaaaaggccataaagaggttgttcaagagaaagtgctgcaggagaaggtgagcggccgc

SEQ ID NO: 363 - DNA, 1112 bp, synthetic construct
  source 1..1112: mol_type = other DNA; note = mmLucy-FLAG-rho-OR1S2
ggatccgccaccatgagccaccagatcctgctgctcctggccctgctgaccctaggcctggctgattacaaggacgacgacgataagatcgaattgatgaacgggaccgagggcccaaacttctacgtgcctttctccaacaagacgggcgtggtggaattcatgcatcaagaaaaccaaaccaccatcactgaattcattctcctgggactctccaaccaggctgaacatcaaaacctcctctttgtgcttttcctgagtatgtatgtggtcactgtggttgggaacgggctcatcattgtggctatcagcttggatatataccttcacacccccatgtatctcttccttgcctacctatcctttgctgatatttcctccatttccaactcagtccccaaaatgctggtgaatattcaaaccaacagccaatccatctcttatgagagctgcatcacacagatgtacttttctattgtgtttgtcgtcactgacaatttgcttttggggaccatggccttcgaccactttgtggcgatctgccaccctctgaactatacaactttcatgcgggccaggttcggcactttgctcacagtcatctcgtggttcctcagtaatattattgctcttacacacacccttctgctcattcaattgctcttctgtgaccacaacactctcccacacttcttctgtgacttggcccctctgctcaaactgtcctgttcagatacaatgatcaatgagcttgtgttgtttattgtgggtttatcagttatcatcttcccctttgtactcatcttcttctcctatgtctgcatcatcagagctgtcctgggagtatcatccacacagggaaagtggaaagccttctccacttgtggctctcacctgacaattgcattactgttctacggaaccactgtaggcgtgtactttttcccctcctccactcaccctgaggacactgataagattggtgctgtcctattcactgtggtgacacccatgatgaaccccttcatctacagcttgaggaacaaagaagttaaaaaggccataaagaggttgttcaagagaaagtgctgcaggagaaggtgagcggccgc

SEQ ID NO: 364 - DNA, 1109 bp, synthetic construct
  source 1..1109: mol_type = other DNA; note = mmLucy-FLAG-rho-OR2A1
ggatccgccaccatgagccaccagatcctgctgctcctggccctgctgaccctaggcctggctgattacaaggacgacgacgataagatcgaattgatgaacgggaccgagggcccaaacttctacgtgcctttctccaacaagacgggcgtggtggaattcatgggggaaaatcagacaatggtcacagagttcctcctactgggatttctcctgggcccaaggattcagatgctcctctttgggctcttctccctgttctatatcttcaccctgctggggaacggggccatcctggggctcatctcactggactccagactccacacccccatgtacttcttcctctcacacctggctgtcgtcgacatcgcctacacccgcaacacggtgccccagatgctggcgaacctcctgcatccagccaagcccatctcctttgctggctgcatgacgcagacctttctctgtttgagttttggacacagcgaatgtctcctgctggtgctgatgtcctacgatcgttacgtggccatctgccaccctctccgatactccgtcatcatgacctggagagtctgcatcaccctggccgtcacttcctggacgtgtggctccctcctggctctggcccatgtggttctcatcctaagactgcccttctctgggcctcatgaaatcaaccacttcttctgtgaaatcctgtctgtcctcaggctggcctgtgctgacacctggctcaaccaggtggtcatctttgcagcctgcgtgttcttcctggtggggccacccagcctggtgcttgtctcctactcgcacatcctggcggccatcctgaggatccagtctggggagggccgcagaaaggccttctccacctgctcctcccacctctgcgtggtgggactcttctttggcagtgccatcatcatgtacatggcccccaagtcccgccatcctgaggagcagcaaaaggtcttttttctattttacagttttttcaacccaacacttaaccccctgatttacagcctgaggaacaaagaagttaaaaaggccataaagaggttgttcaagagaaagtgctgcaggagaaggtgagcggccgc

SEQ ID NO: 365 - DNA, 1109 bp, synthetic construct
  source 1..1109: mol_type = other DNA; note = mmLucy-FLAG-rho-OR2A12
ggatccgccaccatgagccaccagatcctgctgctcctggccctgctgaccctaggcctggctgattacaaggacgacgacgataagatcgaattgatgaacgggaccgagggcccaaacttctacgtgcctttctccaacaagacgggcgtggtggaattcatggaaagcaatcagacctggatcacagaagtcatcctgttgggattccaggtggacccagctctggagttgttcctctttgggtttttcttgctattctacagcttaaccctgatgggaaatgggattatcctggggctcatctacttggactctagactgcacacacccatgtatgtcttcctgtcacacctggccattgtggacatgtcctatgcctcgagtactgtccctaagatgctagcaaatcttgtgatgcacaaaaaagtcatctcctttgctccttgcatacttcagacttttttgtatttggcgtttgctattacagagtgtctgattttggtgatgatgtgctatgatcggtatgtggcaatctgtcaccccttgcaatacaccctcattatgaactggagagtgtgcactgtcctggcctcaacttgctggatatttagctttctcttggctctggtccatattactcttattctgaggctgcctttttgtggcccacaaaagatcaaccactttttctgtcaaatcatgtccgtattcaaattggcctgtgctgacactaggctcaaccaggtggtcctatttgcgggttctgcgttcatcttagtggggccgctctgcctggtgctggtctcctacttgcacatcctggtggccatcttgaggatccagtctggggagggccgcagaaaggccttctctacctgctcctcccacctctgcgtggtggggcttttctttggcagcgccattgtcatgtacatggcccccaagtcaagccattctcaagaacggaggaagatcctttccctgttttacagccttttcaacccgatcctgaaccccctcatctacagccttaggaacaaagaagttaaaaaggccataaagaggttgttcaagagaaagtgctgcaggagaaggtgagcggccgc

SEQ ID NO: 366 - DNA, 1109 bp, synthetic construct
  source 1..1109: mol_type = other DNA; note = mmLucy-FLAG-rho-OR2A14
ggatccgccaccatgagccaccagatcctgctgctcctggccctgctgaccctaggcctggctgattacaaggacgacgacgataagatcgaattgatgaacgggaccgagggcccaaacttctacgtgcctttctccaacaagacgggcgtggtggaattcatggaaggcaacaagacatggatcacagacatcaccttgccgcgattccaggttggtccagcactggagattctcctctgtggacttttctctgccttctatacactcaccctgctggggaatggggtcatctttgggattatctgcctggactgtaagcttcacacacccatgtacttcttcctctcacacctggccattgttgacatatcctatgcttccaactatgtccccaagatgctgacgaatcttatgaaccaggaaagcaccatctccttttttccatgcataatgcagacattcttgtatttggcttttgctcacgtagagtgtctgattttggtggtgatgtcctatgatcgctatgcggacatctgccaccccttacgttacaatagcctcatgagctggagagtgtgcactgtcctggctgtggcttcctgggtgttcagcttcctcctggctctggtccctttagttctcatcctgagcctgcccttctgcgggcctcatgaaatcaaccacttcttctgtgaaatcctgtctgtcctcaagttggcctgtgctgacacctggctcaaccaggtggtcatctttgcagcctgcgtgttcatcctggtggggccactctgcctggtgctggtctcctacttgcgcatcctggccgccatcttgaggatccagtctggggagggccgcagaaaggccttctccacctgctcctcccacctttgcgtggtgggactcttctttggcagcgccattgtcacgtacatggcccccaagtcccgccatcctgaggagcagcagaaagttctttccctgttttacagccttttcaatccaatgctgaaccccctgatatatagcctaaggaacaaagaagttaaaaaggccataaagaggttgttcaagagaaagtgctgcaggagaaggtgagcggccgc

SEQ ID NO: 367 - DNA, 1109 bp, synthetic construct
  source 1..1109: mol_type = other DNA; note = mmLucy-FLAG-rho-OR2A14(S133I, S164R)
ggatccgccaccatgagccaccagatcctgctgctcctggccctgctgaccctaggcctggctgattacaaggacgacgacgataagatcgaattgatgaacgggaccgagggcccaaacttctacgtgcctttctccaacaagacgggcgtggtggaattcatggaaggcaacaagacatggatcacagacatcaccttgccgcgattccaggttggtccagcactggagattctcctctgtggacttttctctgccttctatacactcaccctgctggggaatggggtcatctttgggattatctgcctggactgtaagcttcacacacccatgtacttcttcctctcacacctggccattgttgacatatcctatgcttccaactatgtccccaagatgctgacgaatcttatgaaccaggaaagcaccatctccttttttccatgcataatgcagacattcttgtatttggcttttgctcacgtagagtgtctgattttggtggtgatgtcctatgatcgctatgcggacatctgccaccccttacgttacaatatcctcatgagctggagagtgtgcactgtcctggctgtggcttcctgggtgttcagcttcctcctggctctggtccctttagttctcatcctgaggctgcccttctgcgggcctcatgaaatcaaccacttcttctgtgaaatcctgtctgtcctcaagttggcctgtgctgacacctggctcaaccaggtggtcatctttgcagcctgcgtgttcatcctggtggggccactctgcctggtgctggtctcctacttgcgcatcctggccgccatcttgaggatccagtctggggagggccgcagaaaggccttctccacctgctcctcccacctttgcgtggtgggactcttctttggcagcgccattgtcacgtacatggcccccaagtcccgccatcctgaggagcagcagaaagttctttccctgttttacagccttttcaatccaatgctgaaccccctgatatatagcctaaggaacaaagaagttaaaaaggccataaagaggttgttcaagagaaagtgctgcaggagaaggtgagcggccgc

SEQ ID NO: 368 - DNA, 1109 bp, synthetic construct
  source 1..1109: mol_type = other DNA; note = mmLucy-FLAG-rho-OR2A2
ggatccgccaccatgagccaccagatcctgctgctcctggccctgctgaccctaggcctggctgattacaaggacgacgacgataagatcgaattgatgaacgggaccgagggcccaaacttctacgtgcctttctccaacaagacgggcgtggtggaattcatggaaggcaaccagacatggatcacagacatcaccctgctgggattccaggttggtccagcactggcgattctcctctgtggactcttctctgtcttctatacactcaccctgctggggaatggggtcatctttgggattatctgcctggactctaagcttcacacacccatgtacttcttcctctcacacctggccatcattgacatgtcctatgcttccaacaatgttcccaagatgttggcaaacctaatgaaccagaaaagaaccatctcctttgttccatgcataatgcagacttttttgtatttggcttttgctgttacagagtgcctgattttggtggtgatgtcctatgataggtatgtggccatctgccaccctttccagtacactgtcatcatgagctggagagtgtgcacgatcctggttctcacgtcctggtcatgtgggtttgccctgtccctggtacatgaaattctccttctaaggttgcccttctgtgggccccgggatgtgaaccacctcttctgtgaaattctgtctgtcctcaagctggcctgtgctgacacctgggttaaccaagtggtcatatttgctacctgtgtgtttgtcttagtcgggcctctttccttgattctggtctcctacatgcacatcctcggggccatcctgaagatccagacaaaggagggccgcataaaggccttctccacctgctcctcccacctgtgtgtggttggactattctttggcatagccatggtggtttacatggtcccagactctaatcaacgagaggagcaggagaaaatgctgtccctgtttcacagtgtctttaatccaatgctgaaccccctgatctacagcctgaggaacaaagaagttaaaaaggccataaagaggttgttcaagagaaagtgctgcaggagaaggtgagcggccgc

SEQ ID NO: 369 - DNA, 1109 bp, synthetic construct
  source 1..1109: mol_type = other DNA; note = mmLucy-FLAG-rho-OR2A2(F280L)
ggatccgccaccatgagccaccagatcctgctgctcctggccctgctgaccctaggcctggctgattacaaggacgacgacgataagatcgaattgatgaacgggaccgagggcccaaacttctacgtgcctttctccaacaagacgggcgtggtggaattcatggaaggcaaccagacatggatcacagacatcaccctgctgggattccaggttggtccagcactggcgattctcctctgtggactcttctctgtcttctatacactcaccctgctggggaatggggtcatctttgggattatctgcctggactctaagcttcacacacccatgtacttcttcctctcacacctggccatcattgacatgtcctatgcttccaacaatgttcccaagatgttggcaaacctaatgaaccagaaaagaaccatctcctttgttccatgcataatgcagacttttttgtatttggcttttgctgttacagagtgcctgattttggtggtgatgtcctatgataggtatgtggccatctgccaccctttccagtacactgtcatcatgagctggagagtgtgcacgatcctggttctcacgtcctggtcatgtgggtttgccctgtccctggtacatgaaattctccttctaaggttgcccttctgtgggccccgggatgtgaaccacctcttctgtgaaattctgtctgtcctcaagctggcctgtgctgacacctgggttaaccaagtggtcatatttgctacctgtgtgtttgtcttagtcgggcctctttccttgattctggtctcctacatgcacatcctcggggccatcctgaagatccagacaaaggagggccgcataaaggccttctccacctgctcctcccacctgtgtgtggttggactattctttggcatagccatggtggtttacatggtcccagactctaatcaacgagaggagcaggagaaaatgctgtccctgtttcacagtgtcttgaatccaatgctgaaccccctgatctacagcctgaggaacaaagaagttaaaaaggccataaagaggttgttcaagagaaagtgctgcaggagaaggtgagcggccgc

SEQ ID NO: 370 - DNA, 1109 bp, synthetic construct
  source 1..1109: mol_type = other DNA; note = mmLucy-FLAG-rho-OR2A25
ggatccgccaccatgagccaccagatcctgctgctcctggccctgctgaccctaggcctggctgattacaaggacgacgacgataagatcgaattgatgaacgggaccgagggcccaaacttctacgtgcctttctccaacaagacgggcgtggtggaattcatggggggaaatcagacttccatcacagagttcctcctactgggatttcccattggcccaaggattcagatgctcctctttgggctcttctccctgttctacatcttcattctgttggggaacgggacaatcctggggctcatctcactggactccagactccacacccccatgtacttcttcctctcacacctggcggtcgtcgacatcgcctgtgcttgcagcacggtgccccagatgctggtgaacctcctgcatccagccaagcccatctcctttgctggctgcatgacccagatgtttctgtttttgagttttgcacatacagaatgtctcctcctggtggtgatgtcctatgatcggtacgtggccatctgccaccctctccgatattctaccatcatgacctggaaagtctgcatcactttggcattgacttcctggattttaggagtcttattggcccttgtccatctagtgttactgctaccactgtccttctgtggaccccagaaacttaatcactttttctgtgaaattatggctgttctcaaacttgcctgtgcggatacccacattaatgaggtaatggttttggcaggggcagtgtctgtgctggtgggagccttcttttccactgtaatatcttatgttcatattctatgtgccattctaaagatccagtcaggagaggggtgccagaaagccttctccatctgctcctcccacctctgtgtggttggactcttttatggcacagccatcatcatgtatgttgagccccagtatgagagccccaaggagcagaagaaatatctcctgctgtttcacagcctcttcaatcccatgcttaatcccctaatttatagtcttaggaacaaagaagttaaaaaggccataaagaggttgttcaagagaaagtgctgcaggagaaggtgagcggccgc

SEQ ID NO: 371 - DNA, 1109 bp, synthetic construct
  source 1..1109: mol_type = other DNA; note = mmLucy-FLAG-rho-OR2A25(S75N,A209P)
ggatccgccaccatgagccaccagatcctgctgctcctggccctgctgaccctaggcctggctgattacaaggacgacgacgataagatcgaattgatgaacgggaccgagggcccaaacttctacgtgcctttctccaacaagacgggcgtggtggaattcatggggggaaatcagacttccatcacagagttcctcctactgggatttcccattggcccaaggattcagatgctcctctttgggctcttctccctgttctacatcttcattctgttggggaacgggacaatcctggggctcatctcactggactccagactccacacccccatgtacttcttcctctcacacctggcggtcgtcgacatcgcctgtgcttgcaacacggtgccccagatgctggtgaacctcctgcatccagccaagcccatctcctttgctggctgcatgacccagatgtttctgtttttgagttttgcacatacagaatgtctcctcctggtggtgatgtcctatgatcggtacgtggccatctgccaccctctccgatattctaccatcatgacctggaaagtctgcatcactttggcattgacttcctggattttaggagtcttattggcccttgtccatctagtgttactgctaccactgtccttctgtggaccccagaaacttaatcactttttctgtgaaattatggctgttctcaaacttgcctgtgcggatacccacattaatgaggtaatggttttggcaggggcagtgtctgtgctggtgggacccttcttttccactgtaatatcttatgttcatattctatgtgccattctaaagatccagtcaggagaggggtgccagaaagccttctccatctgctcctcccacctctgtgtggttggactcttttatggcacagccatcatcatgtatgttgagccccagtatgagagccccaaggagcagaagaaatatctcctgctgtttcacagcctcttcaatcccatgcttaatcccctaatttatagtcttaggaacaaagaagttaaaaaggccataaagaggttgttcaagagaaagtgctgcaggagaaggtgagcggccgc

SEQ ID NO: 372 - DNA, 1109 bp, synthetic construct
  source 1..1109: mol_type = other DNA; note = mmLucy-FLAG-rho-OR2A4
ggatccgccaccatgagccaccagatcctgctgctcctggccctgctgaccctaggcctggctgattacaaggacgacgacgataagatcgaattgatgaacgggaccgagggcccaaacttctacgtgcctttctccaacaagacgggcgtggtggaattcatgggagacaatataacatccatcagagagttcctcctactgggatttcccgttggcccaaggattcagatgctcctctttgggctcttctccctgttctacgtcttcaccctgctggggaacgggaccatactggggctcatctcactggactccagactgcacgcccccatgtacttcttcctctcacacctggcggtcgtcgacatcgcctacgcctgcaacacggtgccccggatgctggtgaacctcctgcatccagccaagcccatctcctttgcgggccgcatgatgcagacctttctgttttccacttttgctgtcacagaatgtctcctcctggtggtgatgtcctatgatctgtacgtggccatctgccaccccctccgatatttggccatcatgacctggagagtctgcatcaccctcgcggtgacttcctggaccactggagtccttttatccttgattcatcttgtgttacttctacctttacccttctgtaggccccagaaaatttatcactttttttgtgaaatcttggctgttctcaaacttgcctgtgcagatacccacatcaatgagaacatggtcttggccggagcaatttctgggctggtgggacccttgtccacaattgtagtttcatatatgtgcatcctctgtgctatccttcagatccaatcaagggaagttcagaggaaagccttccgcacctgcttctcccacctctgtgtgattggactcgtttatggcacagccattatcatgtatgttggacccagatatgggaaccccaaggagcagaagaaatatctcctgctgtttcacagcctctttaatcccatgctcaatccccttatctgtagtcttaggaacaaagaagttaaaaaggccataaagaggttgttcaagagaaagtgctgcaggagaaggtgagcggccgc

SEQ ID NO: 373 - DNA, 1109 bp, synthetic construct
  source 1..1109: mol_type = other DNA; note = mmLucy-FLAG-rho-OR2A42
ggatccgccaccatgagccaccagatcctgctgctcctggccctgctgaccctaggcctggctgattacaaggacgacgacgataagatcgaattgatgaacgggaccgagggcccaaacttctacgtgcctttctccaacaagacgggcgtggtggaattcatgggggaaaatcagacaatggtcacagagttcctcctactgggatttctcctgggcccaaggattcagatgctcctctttgggctcttctccctgttctatatcttcaccctgctggggaacggggccatcctggggctcatctcactggactccagactccacacccccatgtacttcttcctctcacacctggctgtcgtcgacatcgcctacacccgcaacacggtgccccagatgctggcgaacctcctgcatccagccaagcccatctcctttgctggttgcatgacgcagacctttctctgtttgagttttggacacagcgaatgtctcctgctggtgctgatgtcctacgatcgttacgtggccatctgccaccctctccgatactccgtcatcatgacctggagagtctgcatcaccctggccgtcacttcctggacgtgtggctccctcctggctctggcccatgtggttctcatcctaagactgcccttctctgggcctcatgaaatcaaccacttcttctgtgaaatcctgtctgtcctcaggctggcctgtgctgacacctggctcaaccaggtggtcatctttgcagcctgcgtgttcttcctggtggggccacccagcctggtgcttgtctcctactcgcacatcctggcggccatcctgaggatccagtctggggagggccgcagaaaggccttctccacctgctcctcccacctctgcgtggtgggactcttctttggcagtgccatcatcatgtacatggcccccaagtcccgccatcctgaggagcagcaaaaggtcttttttctattttacagttttttcaacccaacacttaaccccctgatttacagcctgaggaacaaagaagttaaaaaggccataaagaggttgttcaagagaaagtgctgcaggagaaggtgagcggccgc

SEQ ID NO: 374 - DNA, 1112 bp, synthetic construct
  source 1..1112: mol_type = other DNA; note = mmLucy-FLAG-rho-OR2A5
ggatccgccaccatgagccaccagatcctgctgctcctggccctgctgaccctaggcctggctgattacaaggacgacgacgataagatcgaattgatgaacgggaccgagggcccaaacttctacgtgcctttctccaacaagacgggcgtggtggaattcatgacaaaaaatcagacatgggtcacagaattcattctcctgggatttccactcagcctaaggattcagatgctcctctctgggcttttctccctgttatacgtcttcaccctgctgggaaatggggccatcctggggctcatctggctggactccagactgcacacccccatgtacttctttctctcacacctggccatcattgatatttcgtatgcttccaacaatgtccccaagatgctgacaaaccttggcttgaacaagagaaaaacaatctcctttgtcccatgcacaatgcagacctttttatacatggcttttgctcacactgagtgtctcatcttggtaatgatgtcctacgatcggtacatggctatctgccaccctctgcaatattctgtcatcatgagatggggagtgtgcacagtcctggctgtcacttcttgggcatgtggttcccttctggccctggtccatgtggttctcatcctgaggctgcccttctgtgggccccatgaaatcaaccacttcttctgtgaaatcctgtctgtcctcaagttggcctgtgctgacacctggctcaaccaggtggtcatctttgctgcttcagtgttcatcctggtggggccgctctgcctggtgctggtctcctactcgcgcatcctggcggccatcttgaggatccagtctggggagggccgcagaaaggccttctccacctgctcctcccacctttgcatggtgggactcttctttggcagcgccattgtcatgtacatggcccccaagtcccgccaccctgaggagcagcagaaggtcctttccctgttttacagccttttcaacccgatgctgaaccccttgatctatagcctgaggaacaaagaagttaaaaaggccataaagaggttgttcaagagaaagtgctgcaggagaaggtgagcggccgc

SEQ ID NO: 375 - DNA, 1109 bp, synthetic construct
  source 1..1109: mol_type = other DNA; note = mmLucy-FLAG-rho-OR2A7
ggatccgccaccatgagccaccagatcctgctgctcctggccctgctgaccctaggcctggctgattacaaggacgacgacgataagatcgaattgatgaacgggaccgagggcccaaacttctacgtgcctttctccaacaagacgggcgtggtggaattcatgggggacaatataacatccatcacagagttcctcctactgggatttcccgttggcccaaggattcagatgctcctctttgggctcttctccctgttctacgtcttcaccctgctggggaacgggaccatactggggctcatctcactggactccagactgcacgcccccatgtacttcttcctctcacacctggcggtcgtcgacatcgcctacgcctgcaacacggtgccccggatgctggtgaacctcctgcatccagccaagcccatctcctttgcgggccgcatgatgcagacctttctgttttccacttttgctgtcacagaatgtctcctcctggtggtgatgtcctatgatctgtacgtggccatctgccaccccctccgatatttggccatcatgacctggagagtctgcatcaccctcgcggtgacttcctggaccactggagtccttttatccttgattcatcttgtgttacttctacctttacccttctgtaggccccagaaaatttatcactttttttgtgaaatcttggctgttctcaaacttgcctgtgcagatacccacatcaatgagaacatggtcttggccggagcaatttctgggctggtgggacccttgtccacaattgtagtttcatatatgtgcatcctctgtgctatccttcagatccaatcaagggaagttcagaggaaagccttctgcacctgcttctcccacctctgtgtgattggactcttttatggcacagccattatcatgtatgttggacccagatatgggaaccccaaggagcagaagaaatatctcctgctgtttcacagcctctttaatcccatgctcaatccccttatctgtagtcttaggaacaaagaagttaaaaaggccataaagaggttgttcaagagaaagtgctgcaggagaaggtgagcggccgc

SEQ ID NO: 376 - DNA, 1109 bp, synthetic construct
  source 1..1109: mol_type = other DNA; note = mmLucy-FLAG-rho-OR2AE1
ggatccgccaccatgagccaccagatcctgctgctcctggccctgctgaccctaggcctggctgattacaaggacgacgacgataagatcgaattgatgaacgggaccgagggcccaaacttctacgtgcctttctccaacaagacgggcgtggtggaattcatgtggcagaagaatcagacctctctggcagacttcatccttgaggggctcttcgatgactcccttacccaccttttccttttctccttgaccatggtggtcttccttattgcggtgagtggcaacaccctcaccattctcctcatctgcattgatccccagcttcatacaccaatgtatttcctgctcagccagctctccctcatggatctgatgcatgtctccacaatcatcctgaagatggctaccaactacctatctggcaagaaatctatctcctttgtgggctgtgcaacccagcacttcctctatttgtgtctaggtggtgctgaatgttttctcttagctgtcatgtcctatgaccgctatgttgccatctgtcatccactgcgctatgctgtgctcatgaacaagaaggtgggactgatgatggctgtcatgtcatggttgggggcatccgtgaactccctaattcacatggcgatcttgatgcacttccctttctgtgggcctcggaaagtctaccacttctactgtgagttcccagctgttgtgaagttggtatgtggcgacatcactgtgtatgagaccacagtgtacatcagcagcattctcctcctcctccccatcttcctgatttctacatcctatgtcttcatccttcaaagtgtcattcagatgcgctcatctgggagcaagagaaatgcctttgccacttgtggctcccacctcacggtggtttctctttggtttggtgcctgcatcttctcctacatgagacccaggtcccagtgcactctattgcagaacaaagttggttctgtgttctacagcatcattacgcccacattgaattctctgatttatactctcaggaacaaagaagttaaaaaggccataaagaggttgttcaagagaaagtgctgcaggagaaggtgagcggccgc

SEQ ID NO: 377 - DNA, 1109 bp, synthetic construct
  source 1..1109: mol_type = other DNA; note = mmLucy-FLAG-rho-OR2AE1(I77T)
ggatccgccaccatgagccaccagatcctgctgctcctggccctgctgaccctaggcctggctgattacaaggacgacgacgataagatcgaattgatgaacgggaccgagggcccaaacttctacgtgcctttctccaacaagacgggcgtggtggaattcatgtggcagaagaatcagacctctctggcagacttcatccttgaggggctcttcgatgactcccttacccaccttttccttttctccttgaccatggtggtcttccttattgcggtgagtggcaacaccctcaccattctcctcatctgcattgatccccagcttcatacaccaatgtatttcctgctcagccagctctccctcatggatctgatgcatgtctccacaaccatcctgaagatggctaccaactacctatctggcaagaaatctatctcctttgtgggctgtgcaacccagcacttcctctatttgtgtctaggtggtgctgaatgttttctcttagctgtcatgtcctatgaccgctatgttgccatctgtcatccactgcgctatgctgtgctcatgaacaagaaggtgggactgatgatggctgtcatgtcatggttgggggcatccgtgaactccctaattcacatggcgatcttgatgcacttccctttctgtgggcctcggaaagtctaccacttctactgtgagttcccagctgttgtgaagttggtatgtggcgacatcactgtgtatgagaccacagtgtacatcagcagcattctcctcctcctccccatcttcctgatttctacatcctatgtcttcatccttcaaagtgtcattcagatgcgctcatctgggagcaagagaaatgcctttgccacttgtggctcccacctcacggtggtttctctttggtttggtgcctgcatcttctcctacatgagacccaggtcccagtgcactctattgcagaacaaagttggttctgtgttctacagcatcattacgcccacattgaattctctgatttatactctcaggaacaaagaagttaaaaaggccataaagaggttgttcaagagaaagtgctgcaggagaaggtgagcggccgc

SEQ ID NO: 378 - DNA, 1112 bp, synthetic construct
  source 1..1112: mol_type = other DNA; note = mmLucy-FLAG-rho-OR2AG1
ggatccgccaccatgagccaccagatcctgctgctcctggccctgctgaccctaggcctggctgattacaaggacgacgacgataagatcgaattgatgaacgggaccgagggcccaaacttctacgtgcctttctccaacaagacgggcgtggtggaattcatggagctctggaacttcaccttgggaagtggcttcattttggtggggattctgaatgacagtgggtctcctgaactgctctgtgctacaattacaatcctatacttgttggccctgatcagcaatggcctactgctcctggctatcaccatggaagcccggctccacatgcccatgtacctcctgcttgggcagctctctctcatggacctcctgttcacatctgttgtcactcccaaggcccttgcggactttctgcgcagagaaaacaccatctcctttggaggctgtgcccttcagatgttcctggcactgacaatgggtggtgctgaggacctcctactggccttcatggcctatgacaggtatgtggccatttgtcatcctctgacatacatgaccctcatgagctcaagagcctgctggctcatggtggccacgtcctggatcctggcatccctaagtgccctaatatataccgtgtataccatgcactatcccttctgcagggcccaggagatcaggcatcttctctgtgagatcccacacttgctgaaggtggcctgtgctgatacctccagatatgagctcatggtatatgtgatgggtgtgaccttcctgattccctctcttgctgctatactggcctcctatacacaaattctactcactgtgctccatatgccatcaaatgaggggaggaagaaagcccttgtcacctgctcttcccacctgactgtggttgggatgttctatggagctgccacattcatgtatgtcttgcccagttccttccacagcaccagacaagacaacatcatctctgttttctacacaattgtcactccagccctgaatccactcatctacagcctgaggaacaaagaagttaaaaaggccataaagaggttgttcaagagaaagtgctgcaggagaaggtgagcggccgc

SEQ ID NO: 379 - DNA, 1112 bp, synthetic construct
  source 1..1112: mol_type = other DNA; note = mmLucy-FLAG-rho-OR2AG2(Y28C)
ggatccgccaccatgagccaccagatcctgctgctcctggccctgctgaccctaggcctggctgattacaaggacgacgacgataagatcgaattgatgaacgggaccgagggcccaaacttctacgtgcctttctccaacaagacgggcgtggtggaattcatggagctccggaactccaccttgggaagcggcttcatcttggtggggattctgaatgacagtgggtctcctgaactgctctgtgctacatttacaatcctatacatgttggcactgaccagcaatggtctgctgctcctggccatcaccatagaagcccggctccacatgcccatgtacctcctgcttgggcagctctctctcatggacctcctgttcacatctgttgtcactcccaaggcccttgcggactttctgcgcagagaaaacactatctcctttggaggctgtgcacttcagatgttcctggcactgacaatgggtagcgctgaggacctcctactggccttcatggcctatgacaggtatgtggccatttgtcatcctctgaaatacatgaccctcatgagcccaagagtctgctggatcatggtggccacatcctggatcctggcatccctgattgctataggacataccatgtacactatgcacctccctttctgtgtgtcctgggaaatcaggcatctgctctgtgagatcccacccttgctgaagttggcctgtgctgatacctccaggtatgagcttataatatacgtgacaggtgtgactttcctcttgctccccatttctgccattgtggcctcctacacactagtcctattcactgtgcttcgtatgccatcaaatgaggggaggaagaaagcccttgtcacctgctcttcccacctgattgtggtcgggatgttctatggagctgccacattcatgtatgtcttgcccagttccttccacagccccaaacaagacaacatcatctctgttttctacacaattgtcactccagccctgaatccactcatctacagcctgaggaacaaagaagttaaaaaggccataaagaggttgttcaagagaaagtgctgcaggagaaggtgagcggccgc

SEQ ID NO: 380 - DNA, 1115 bp, synthetic construct
  source 1..1115: mol_type = other DNA; note = mmLucy-FLAG-rho-OR2AJ1
ggatccgccaccatgagccaccagatcctgctgctcctggccctgctgaccctaggcctggctgattacaaggacgacgacgataagatcgaattgatgaacgggaccgagggcccaaacttctacgtgcctttctccaacaagacgggcgtggtggaattcatgatgggccatcagaatcacactttcagcagtgatttcatacttttgggattgttctcttcttccccaacaagtgtggtcttcttcttagttttatttgtcattttcattatgagtgtaacagaaaatacgctcatgatcctcctcattcgcagtgactcccgactccacactccaatgtattttctgctcagccatctctccttaatggatatcttgcatgtttccaacatcgttcccaaaatggtcactaactttctgtcaggcagcagaactatttcatttgcaggttgtgggttccaggtatttctgtccctcaccctcctgggtggtgagtgccttctcctggctgcaatgtcctgtgatcgctatgtggctatctgtcacccgctgcgctatccgattcttatgaaggagtatgccagcgctctcatggctggaggctcctggctcattggggttttcaactccacagtccacacagcttatgcactgcagtttcccttctgtggctctagggcaattgatcacttcttctgtgaagtccctgccatgttgaagttgtcctgtgcagacacaacacgctatgaacgaggggtttgtgtaagtgctgtgatcttcctgctgatccctttctccttgatctctgcttcttatggccaaattattcttactgtcctccagatgaaatcatcagaggcaaggaaaaagtcattttccacttgttccttccacatgattgtggtcacgatgtactatgggccatttatttttacatatatgagacctaaatcataccacactccaggccaggataagttcctggcaatattctatacgatcctcacacccacactcaaccctttcatctacagctttaggaacaaagaagttaaaaaggccataaagaggttgttcaagagaaagtgctgcaggagaaggtgagcggccgc

SEQ ID NO: 381 - DNA, 1112 bp, synthetic construct
  source 1..1112: mol_type = other DNA; note = mmLucy-FLAG-rho-OR2AK2(V188M)
ggatccgccaccatgagccaccagatcctgctgctcctggccctgctgaccctaggcctggctgattacaaggacgacgacgataagatcgaattgatgaacgggaccgagggcccaaacttctacgtgcctttctccaacaagacgggcgtggtggaattcatgaaaacaggaaatcaaagttttgggacagattttctacttgttggtcttttccaatatggctggataaactctcttctctttgtcgtcattgccaccctctttacagttgctctgacaggaaatatcatgctgatccacctcattcgactgaacaccagactccacactccaatgtactttctgctcagtcagctctccatcgttgacctcatgtacatctccaccacagtgcccaagatggcagtcagcttcctctcacagagtaagaccattagatttttgggctgtgagattcaaacgtatgtgttcttggcccttggtggaactgaagcccttctccttggttttatgtcttatgatcgctatgtagctatctgtcaccctttacattatcctatgcttatgagcaagaagatctgctgcctcatggttgcatgtgcatgggccagtggttctatcaatgctttcatacatacattgtatgtgtttcagcttccattctgtaggtctcggctcattaaccactttttctgtgaagttccagctctactatcattgatgtgtcaggacacctcccagtatgagtatacagtcctcctgagtggacttattatcttgctactaccattcctagccattctggcttcctatgctcgtgtgcttattgtggtattccagatgagctcaggaaaaggacaggcaaaagctgtttccacttgttcctcccacctgattgtggcaagcctgttctatgcaaccactctctttacctacacaaggccacactccttgcgttccccttcacgggataaggcggtggcagtattttacaccattgtcacacctctactgaacccatttatctacagcctgaggaacaaagaagttaaaaaggccataaagaggttgttcaagagaaagtgctgcaggagaaggtgagcggccgc

SEQ ID NO: 382 - DNA, 1112 bp, synthetic construct
  source 1..1112: mol_type = other DNA; note = mmLucy-FLAG-rho-OR2AK2(S84N)
ggatccgccaccatgagccaccagatcctgctgctcctggccctgctgaccctaggcctggctgattacaaggacgacgacgataagatcgaattgatgaacgggaccgagggcccaaacttctacgtgcctttctccaacaagacgggcgtggtggaattcatgaaaacaggaaatcaaagttttgggacagattttctacttgttggtcttttccaatatggctggataaactctcttctctttgtcgtcattgccaccctctttacagttgctctgacaggaaatatcatgctgatccacctcattcgactgaacaccagactccacactccaatgtactttctgctcagtcagctctccatcgttgacctcatgtacatctccaccacagtgcccaagatggcagtcaacttcctctcacagagtaagaccattagatttttgggctgtgagattcaaacgtatgtgttcttggcccttggtggaactgaagcccttctccttggttttatgtcttatgatcgctatgtagctatctgtcaccctttacattatcctatgcttatgagcaagaagatctgctgcctcatggttgcatgtgcatgggccagtggttctatcaatgctttcatacatacattgtatgtgtttcagcttccattctgtaggtctcggctcattaaccactttttctgtgaagttccagctctactatcattggtgtgtcaggacacctcccagtatgagtatacagtcctcctgagtggacttattatcttgctactaccattcctagccattctggcttcctatgctcgtgtgcttattgtggtattccagatgagctcaggaaaaggacaggcaaaagctgtttccacttgttcctcccacctgattgtggcaagcctgttctatgcaaccactctctttacctacacaaggccacactccttgcgttccccttcacgggataaggcggtggcagtattttacaccattgtcacacctctactgaacccatttatctacagcctgaggaacaaagaagttaaaaaggccataaagaggttgttcaagagaaagtgctgcaggagaaggtgagcggccgc

SEQ ID NO: 383 - DNA, 1106 bp, synthetic construct
  source 1..1106: mol_type = other DNA; note = mmLucy-FLAG-rho-OR2AP1
ggatccgccaccatgagccaccagatcctgctgctcctggccctgctgaccctaggcctggctgattacaaggacgacgacgataagatcgaattgatgaacgggaccgagggcccaaacttctacgtgcctttctccaacaagacgggcgtggtggaattcatgaaaaataaaaccgtgttaactgagtttatccttctgggtctaacagatgtccctgaactccaggtggcagttttcacctttcttttccttgcgtatttactcagcatccttggaaatctgactatcctcatcctcaccttgctggactcccaccttcagactcccatgtatttctttctccggaacttctccttcttggaaatttccttcacaaacatcttcattccaagggtcctgattagcatcacaacagggaacaagagtatcagctttgctggctgcttcactcagtatttctttgccatgttccttggggctacagagttttaccttctggctgccatgtcctatgaccgctatgtggccatctgcaaacctctgcattacaccaccatcatgagcagcagaatctgcatccagctgattttctgctcttggctgggtgggctaatggctattataccaacaatcaccctgatgagtcagcaggacttttgtgcatccaacagactgaatcattacttctgtgactatgagcctcttctggaactctcatgttcagacacaagcctcatagagaaggttgtctttcttgtggcatctgtgaccctggtggtcactctggtgctagtgattctctcctatgcattcattatcaagactattctgaagctcccctctgcccaacaaaggacaaaagccttttccacatgttcttcccacatgattgtcatctccctctcttacggaagctgcatgtttatgtacattaatccctctgcaaaagaaggggatacattcaacaagggagtagctctactcattacttcagttgctcctttgttgaacccctttatttacaccctaaggaacaaagaagttaaaaaggccataaagaggttgttcaagagaaagtgctgcaggagaaggtgagcggccgc

SEQ ID NO: 384 - DNA, 1127 bp, synthetic construct
  source 1..1127: mol_type = other DNA; note = mmLucy-FLAG-rho-OR2AT4
ggatccgccaccatgagccaccagatcctgctgctcctggccctgctgaccctaggcctggctgattacaaggacgacgacgataagatcgaattgatgaacgggaccgagggcccaaacttctacgtgcctttctccaacaagacgggcgtggtggaattcatggatgccacagcctgtaatgaatcagtggatggctcacccgtcttctatctattgggcatcccctctctgccagagaccttcttcctccctgtgttttttattttcctcctcttctaccttctcatcctgatgggtaatgccctgatcctggtggccgtggtggcagagcccagcctccacaagcccatgtacttctttctgatcaatctctccaccttggacatccttttcaccacaaccactgtccccaagatgctgtccttattcttgcttggggaccgcttcctcagcttttcttcctgcttactgcagatgtacctcttccaaagttttacatgttcagaagccttcatcctggtggtcatggcctatgaccgctatgtggctatctgccacccactgcactaccctgtcctcatgaacccacagaccaatgctaccttggcagccagtgcctggctaactgccctcctcctgcccatcccagcagtagtaaggacctcccagatggcatataacagcattgcctacatctaccactgcttctgtgatcatctggctgtggtccaggcctcctgctctgacaccaccccccagaccctcatgggcttctgcatcgccatggtggtgtccttcctcccccttctcctggtgcttctctcctatgtccacatcctggcctcagtgcttcgcatcagttccctagaaggacgggcaaaagccttctccacctgcagctcccaccttctggtcgtgggcacctactactcatctattgccatagcctacgtggcctacagggctgacctgccccttgacttccatatcatgggcaatgtggtatatgccattctcacaccaattctcaaccccctcatttacacgctgaggaacaaagaagttaaaaaggccataaagaggttgttcaagagaaagtgctgcaggagaaggtgagcggccgc

SEQ ID NO: 385 - DNA, 1124 bp, synthetic construct
  source 1..1124: mol_type = other DNA; note = mmLucy-FLAG-rho-OR2B11(V198M,G223D)
ggatccgccaccatgagccaccagatcctgctgctcctggccctgctgaccctaggcctggctgattacaaggacgacgacgataagatcgaattgatgaacgggaccgagggcccaaacttctacgtgcctttctccaacaagacgggcgtggtggaattcatgaaaagtgacaaccatagcttcttaggggactcccctaaagccttcatccttctgggtgtgtctgacaggccgtggctggaactccctctctttgtggtcctcctgctgtcctatgtgctggccatgttggggaacgtcgccatcatcctggcatcccgggtggatcctcaactccacagccccatgtacatcttcctcagtcacctgtccttcctggacctctgctacaccaccacgacagtccctcagatgctggtcaacatgggcagttcccagaagaccatcagctatggaggctgcactgtgcaatatgcagtcttccactggctgggatgcacggagtgcatcgtcctggccgccatggccctggaccgctacgtggccatctgcaagcccctgcactatgccgttctcatgcaccgtgctctctgtcagcagctcgtggctctggcctggctcagtggcttcggcaactccttcgtgcaggtggtcctgacggtgcaattgccattctgcgggcggcaggtgctgaacaactttttctgtgaggtgccggccgtgatcaagctgtcgtgtgctgacaccgctatgaatgacaccatactggctgtgctggtggccttcttcgtgttggtgcccctggctctcatccttctctcctatgactttattgcccgggcagtgctcaggatccagtcctccaagggacgacacaaggcctttgggacgtgttcctcccacctgatgatcgtctccctcttctacctacctgcgatttacatgtatctgcagcccccttccagctactcccaagagcagggcaaatttatttctctcttctattccataatcacccccactctcaatcccttcacctacaccctgaggaacaaagaagttaaaaaggccataaagaggttgttcaagagaaagtgctgcaggagaaggtgagcggccgc

SEQ ID NO: 386 - DNA, 1124 bp, synthetic construct
  source 1..1124: mol_type = other DNA; note = mmLucy-FLAG-rho-OR2B11(I130S,V198M)
ggatccgccaccatgagccaccagatcctgctgctcctggccctgctgaccctaggcctggctgattacaaggacgacgacgataagatcgaattgatgaacgggaccgagggcccaaacttctacgtgcctttctccaacaagacgggcgtggtggaattcatgaaaagtgacaaccatagcttcttaggggactcccctaaagccttcatccttctgggtgtgtctgacaggccgtggctggaactccctctctttgtggtcctcctgctgtcctatgtgctggccatgttggggaacgtcgccatcatcctggcatcccgggtggatcctcaactccacagccccatgtacatcttcctcagtcacctgtccttcctggacctctgctacaccaccacgacagtccctcagatgctggtcaacatgggcagttcccagaagaccatcagctatggaggctgcactgtgcaatatgcagtcttccactggctgggatgcacggagtgcatcgtcctggccgccatggccctggaccgctacgtggccagctgcaagcccctgcactatgccgttctcatgcaccgtgctctctgtcagcagctcgtggctctggcctggctcagtggcttcggcaactccttcgtgcaggtggtcctgacggtgcaattgccattctgcgggcggcaggtgctgaacaactttttctgtgaggtgccggccgtgatcaagctgtcgtgtgctgacaccgctatgaatgacaccatactggctgtgctggtggccttcttcgtgttggtgcccctggctctcatccttctctcctatggctttattgcccgggcagtgctcaggatccagtcctccaagggacgacacaaggcctttgggacgtgttcctcccacctgatgatcgtctccctcttctacctacctgcgatttacatgtatctgcagcccccttccagctactcccaagagcagggcaaatttatttctctcttctattccataatcacccccactctcaatcccttcacctacaccctgaggaacaaagaagttaaaaaggccataaagaggttgttcaagagaaagtgctgcaggagaaggtgagcggccgc

SEQ ID NO: 387 - DNA, 1112 bp, synthetic construct
  source 1..1112: mol_type = other DNA; note = mmLucy-FLAG-rho-OR2B2
ggatccgccaccatgagccaccagatcctgctgctcctggccctgctgaccctaggcctggctgattacaaggacgacgacgataagatcgaattgatgaacgggaccgagggcccaaacttctacgtgcctttctccaacaagacgggcgtggtggaattcatgaattgggtaaataagagtgtcccacaggagttcattctgttagttttctcagatcaaccatggctagagattccaccctttgtgatgtttctgttttcctatatcttgacaatctttggcaatctgacaataattcttgtgtcacatgtggatttcaaactccacacccctatgtacttttttcttagcaatctctcactcctggacctttgctataccacaagtacagttccacaaatgctggtaaacatatgcaacaccaggaaagtaatcagttatggtggctgtgtggcccagcttttcattttcctggccttgggttccacagaatgtcttctcctggccgtcatgtgctttgataggtttgtagctatttgtcggcctctccattactcaattatcatgcaccagaggctctgcttccagttggcagctgcatcctggattagtggctttagcaattcagtattacagtccacctggacacttaagatgccactgtgtggtcacaaagaagtggatcacttcttctgtgaagtccctgctctgctcaagttgtcctgtgttgacacaacagcaaatgaggctgaactattcttcatcagtgtgctattccttctaatacccgtgacactcatccttatatcgtatgcttttattgtccaagcagtgttgagaatccagtctgctgaaggtcaacgaaaggcatttgggacatgtggctcccatctaattgtggtgtcacttttttatggtacagctatctccatgtacctgcaaccaccttcacccagctccaaagaccggggaaagatggtttctctcttctgtggaatcattgcacccatgctgaatccccttatatatacacttaggaacaaagaagttaaaaaggccataaagaggttgttcaagagaaagtgctgcaggagaaggtgagcggccgc

SEQ ID NO: 388 - DNA, 1112 bp, synthetic construct
  source 1..1112: mol_type = other DNA; note = mmLucy-FLAG-rho-OR2B3
ggatccgccaccatgagccaccagatcctgctgctcctggccctgctgaccctaggcctggctgattacaaggacgacgacgataagatcgaattgatgaacgggaccgagggcccaaacttctacgtgcctttctccaacaagacgggcgtggtggaattcatgaattgggaaaatgagagctccccaaaagagtttatactacttggcttctcagatagggcttggctacaaatgcccctttttgtggtcctgttaatatcatacacaatcaccatatttggcaatgtgtccatcatgatggtgtgcattctggatcccaaacttcatactcccatgtatttctttctcactaatctctccatcttagatctctgctataccacaactacagtccctcatatgttggtaaatattggttgcaacaaaaagaccatcagctatgctggctgtgtggcccacctcatcatcttcctggccctaggtgctacagagtgtctccttctggctgttatgtcctttgacagatatgtggctgtttgcagacccctccactatgtagtcatcatgaattattggttctgcctaaggatggcagccttctcatggctcattggtttcggcaactcagtgctgcagtcttccttgactcttaacatgccacgctgtggtcaccaggaagtggaccactttttctgtgaggtgcctgcacttctcaagttgtcatgtgctgacacaaagcctattgaggctgagctcttcttctttagtgtactaattcttctaattccagtgacattgatcctcatctcctatggcttcatagctcaagcagtattaaaaatcaggtcagcagaaggacggcaaaaagcatttgggacatgtgggtcccacatgattgtggtgtccctcttttatggaacagccatttatatgtatcttcaaccaccttcatccacctctaaggactggggaaagatggtttccctcttctatggaatcatcacatccatgttgaactccctcatctacagccttaggaacaaagaagttaaaaaggccataaagaggttgttcaagagaaagtgctgcaggagaaggtgagcggccgc

SEQ ID NO: 389 - DNA, 1112 bp, synthetic construct
  source 1..1112: mol_type = other DNA; note = mmLucy-FLAG-rho-OR2B6
ggatccgccaccatgagccaccagatcctgctgctcctggccctgctgaccctaggcctggctgattacaaggacgacgacgataagatcgaattgatgaacgggaccgagggcccaaacttctacgtgcctttctccaacaagacgggcgtggtggaattcatgaattgggtaaatgacagcatcatacaggagtttattctgctgggtttctcagatcgaccttggctggagtttccactccttgtggtcttcttgatttcttacactgtgaccatctttggcaatctgaccattattctagtgtcacgcctggacaccaaacttcatacccccatgtatttttttcttaccaatctatcactcctggatctttgttacaccacatgtacagtcccacaaatgctagtaaatttatgcagcatcaggaaagtaatcagttatcgtggctgtgtagcccagcttttcatatttctggccttgggggctactgaatatcttctcctggccgtcatgtcctttgataggtttgtagctatttgtcggcctctccattactcagttatcatgcaccagagactctgcctccagttggcagctgcatcctgggttactggttttagtaactcagtgtggttgtctaccctgactctccagctgccactctgtgacccctatgtgatagatcactttctctgtgaagtccctgcactgctcaagttatcttgtgttgagacaacagcaaatgaggctgaactattccttgtcagtgagctcttccatctaatacccctgacactcatccttatatcatatgcttttattgtccgagcagtattgaggatacagtctgctgaaggtcgacaaaaagcatttgggacatgtggttcccatctaattgtggtgtctcttttttatagtacagccgtctctgtgtacctgcaaccaccttcgcccagctccaaggaccaaggaaagatggtttctctcttctatggaatcattgcacccatgctgaatccccttatatatacacttaggaacaaagaagttaaaaaggccataaagaggttgttcaagagaaagtgctgcaggagaaggtgagcggccgc

SEQ ID NO: 390 - DNA, 1112 bp, synthetic construct
  source 1..1112: mol_type = other DNA; note = mmLucy-FLAG-rho-OR2C1
ggatccgccaccatgagccaccagatcctgctgctcctggccctgctgaccctaggcctggctgattacaaggacgacgacgataagatcgaattgatgaacgggaccgagggcccaaacttctacgtgcctttctccaacaagacgggcgtggtggaattcatggacggggtgaatgatagctccttgcagggctttgttctgatgggcatatcagaccatccccagctggagatgatcttttttatagccatcctcttctcctatttgctgaccctacttgggaactcaaccatcatcttgctttcccgcctggaggcccggctccatacacccatgtacttcttcctcagcaacctctcctccttggaccttgctttcgctactagttcagtcccccaaatgctgatcaatttatggggaccaggcaagaccatcagctatggtggctgcataacccagctctatgtcttcctttggctgggggccaccgagtgcatcctgctggtggtgatggcatttgaccgctacgtggcagtgtgccggcccctccgctacaccgccatcatgaacccccagctctgctggctgctggctgtgattgcctgcctgggtggcttgggcaactctgtgatccagtcaacattcactctgcagctcccattgtgtgggcaccggagggtggagggattcctctgcgaggtgcctgccatgatcaaactggcctgtggcgacacaagtctcaaccaggctgtgctcaatggtgtctgcaccttcttcactgcagtcccactaagcatcatcgtgatctcctactgcctcattgctcaggcagtgctgaaaatccgctctgcagaggggaggcgaaaggcgttcaatacgtgcctctcccatctgctggtggtgttcctcttctatggctcagccagctatgggtatctgcttccggccaagaacagcaaacaggaccagggcaagttcatttccctgttctactcgttggtcacacccatggtgaatcccctcatctacacgctgaggaacaaagaagttaaaaaggccataaagaggttgttcaagagaaagtgctgcaggagaaggtgagcggccgc

SEQ ID NO: 391 - DNA, 1115 bp, synthetic construct
  source 1..1115: mol_type = other DNA; note = mmLucy-FLAG-rho-OR2C3(T20A,P68S)
ggatccgccaccatgagccaccagatcctgctgctcctggccctgctgaccctaggcctggctgattacaaggacgacgacgataagatcgaattgatgaacgggaccgagggcccaaacttctacgtgcctttctccaacaagacgggcgtggtggaattcatgatggaaatagccaatgtgagttctccagaagtctttgtcctcctgggcttctccgcacgaccctcactagaaactgtcctcttcatagttgtcttgagtttttacatggtatcgatcttgggcaatggcatcatcattctggtctcccatacagatgtgcacctccacacacctatgtacttctttcttgccaacctctccttcctggacatgagcttcaccacgagcattgtcccacagctcctggctaacctctggggaccacagaaaaccataagctatggagggtgtgtggtccagttctatatctcccattggctgggggcaaccgagtgtgtcctgctggccaccatgtcctatgaccgctacgctgccatctgcaggccactccattacactgtcattatgcatccacagctttgccttgggctagctttggcctcctggctggggggtctgaccaccagcatggtgggctccacgctcaccatgctcctaccgctgtgtgggaacaattgcatcgaccacttcttttgcgagatgcccctcattatgcaactggcttgtgtggataccagcctcaatgagatggagatgtacctggccagctttgtctttgttgtcctgcctctggggctcatcctggtctcttacggccacattgcccgggccgtgttgaagatcaggtcagcagaagggcggagaaaggcattcaacacctgttcttcccacgtggctgtggtgtctctgttttacgggagcatcatcttcatgtatctccagccagccaagagcacctcccatgagcagggcaagttcatagctctgttctacaccgtagtcactcctgcgctgaacccacttatttacaccctgaggaacaaagaagttaaaaaggccataaagaggttgttcaagagaaagtgctgcaggagaaggtgagcggccgc

SEQ ID NO: 392 - DNA, 1106 bp, synthetic construct
  source 1..1106: mol_type = other DNA; note = mmLucy-FLAG-rho-OR2D2
ggatccgccaccatgagccaccagatcctgctgctcctggccctgctgaccctaggcctggctgattacaaggacgacgacgataagatcgaattgatgaacgggaccgagggcccaaacttctacgtgcctttctccaacaagacgggcgtggtggaattcatgagacagataaatcagacacaagtgacagaattcctccttctgggactctctgatgggccacacaccgagcagctgctatttatcgtattattgggtgtctacctggtcactgtgcttggaaatctgcttctaatctcccttgttcatgttgactcccaacttcacacacccatgtatttttttctctgcaacttgtctctggctgacctctgtttctctaccaacatagttcctcaggcactagtccacctgctttccagaaagaaggtcattgcattcacactttgcgcagctcgacttctctttttcctcatttttgggtgtacccagtgcgcccttcttgcagtgatgtcctatgatcgctatgttgcaatctgcaatcctctgcgttaccctaacatcatgacctggaaagtgtgtgtccagctggcaacaggatcatggaccagtggcattctggtgtctgtggtagacaccaccttcatactgaggctaccctaccgaggcagtaacagcattgctcatttcttttgtgaggcccctgcactattgatcttagcatccacagacacccatgcatcagagatggccatttttcttatgggggttgtgattctcctcatacctgtttttctgattctggtatcctatggccgtatcatagtaactgtggtcaagatgaagtcaactgtggggagtctcaaggcattttctacctgtggctcccacctcatggtggtcatacttttttatggatcagcaattatcacttacatgacacccaagtcttccaaacagcaggaaaaatcggtgtctgttttctatgcaatagtgactcccatgcttaatcccctcatctatagcctgaggaacaaagaagttaaaaaggccataaagaggttgttcaagagaaagtgctgcaggagaaggtgagcggccgc

SEQ ID NO: 393 - DNA, 1106 bp, synthetic construct
  source 1..1106: mol_type = other DNA; note = mmLucy-FLAG-rho-OR2D2(M202T)
ggatccgccaccatgagccaccagatcctgctgctcctggccctgctgaccctaggcctggctgattacaaggacgacgacgataagatcgaattgatgaacgggaccgagggcccaaacttctacgtgcctttctccaacaagacgggcgtggtggaattcatgagacagataaatcagacacaagtgacagaattcctccttctgggactctctgatgggccacacaccgagcagctgctatttatcgtattattgggtgtctacctggtcactgtgcttggaaatctgcttctaatctcccttgttcatgttgactcccaacttcacacacccatgtatttttttctctgcaacttgtctctggctgacctctgtttctctaccaacatagttcctcaggcactagtccacctgctttccagaaagaaggtcattgcattcacactttgcgcagctcgacttctctttttcctcatttttgggtgtacccagtgcgcccttcttgcagtgatgtcctatgatcgctatgttgcaatctgcaatcctctgcgttaccctaacatcatgacctggaaagtgtgtgtccagctggcaacaggatcatggaccagtggcattctggtgtctgtggtagacaccaccttcatactgaggctaccctaccgaggcagtaacagcattgctcatttcttttgtgaggcccctgcactattgatcttagcatccacagacacccatgcatcagagatggccatttttcttacgggggttgtgattctcctcatacctgtttttctgattctggtatcctatggccgtatcatagtaactgtggtcaagatgaagtcaactgtggggagtctcaaggcattttctacctgtggctcccacctcatggtggtcatacttttttatggatcagcaattatcacttacatgacacccaagtcttccaaacagcaggaaaaatcggtgtctgttttctatgcaatagtgactcccatgcttaatcccctcatctatagcctgaggaacaaagaagttaaaaaggccataaagaggttgttcaagagaaagtgctgcaggagaaggtgagcggccgc

SEQ ID NO: 394 - DNA, 1112 bp, synthetic construct
  source 1..1112: mol_type = other DNA; note = mmLucy-FLAG-rho-OR2D3
ggatccgccaccatgagccaccagatcctgctgctcctggccctgctgaccctaggcctggctgattacaaggacgacgacgataagatcgaattgatgaacgggaccgagggcccaaacttctacgtgcctttctccaacaagacgggcgtggtggaattcatgggagaagaaaaccaaacctttgtgtccaagtttatcttcctgggtctttcacaggacttgcagacccagatcctgctatttatccttttcctcatcatttatctgctgaccgtgcttggaaaccagctcatcatcattctcatcttcctggattctcgccttcacactcccatgtatttttttcttagaaatctctcctttgcagatctctgtttctctactagcattgtccctcaagtgttggttcacttcttggtaaagaggaaaaccatttctttttatgggtgtatgacacagataattgtctttcttctggttgggtgtacagagtgtgcgctgctggcagtgatgtcctatgaccggtatgtggctgtctgcaagcccctgtactactctaccatcatgacacaacgggtgtgtctctggctgtccttcaggtcctgggccagtggggcactagtgtctttagtagataccagctttactttccatcttccctactggggacagaatataatcaatcactacttttgtgaacctcctgccctcctgaagctggcttccatagacacttacagcacagaaatggccatcttttcaatgggcgtggtaatcctcctggcccctgtctccctgattcttggttcttattggaatattatctccactgttatccagatgcagtctggggaagggagactcaaggctttttccacctgtggctcccatcttattgttgttgtcctcttctatgggtcaggaatattcacctacatgcgaccaaactccaagactacaaaagaactggataaaatgatatctgtgttctatacagcggtgactccaatgttgaaccccataatttatagcttgaggaacaaagaagttaaaaaggccataaagaggttgttcaagagaaagtgctgcaggagaaggtgagcggccgc

SEQ ID NO: 395 - DNA, 1112 bp, synthetic construct
  source 1..1112: mol_type = other DNA; note = mmLucy-FLAG-rho-OR2D3(L66I,W149S)
ggatccgccaccatgagccaccagatcctgctgctcctggccctgctgaccctaggcctggctgattacaaggacgacgacgataagatcgaattgatgaacgggaccgagggcccaaacttctacgtgcctttctccaacaagacgggcgtggtggaattcatgggagaagaaaaccaaacctttgtgtccaagtttatcttcctgggtctttcacaggacttgcagacccagatcctgctatttatccttttcctcatcatttatctgctgaccgtgcttggaaaccagctcatcatcattctcatcttcctggattctcgccttcacactcccatgtatttttttcttagaaatatctcctttgcagatctctgtttctctactagcattgtccctcaagtgttggttcacttcttggtaaagaggaaaaccatttctttttatgggtgtatgacacagataattgtctttcttctggttgggtgtacagagtgtgcgctgctggcagtgatgtcctatgaccggtatgtggctgtctgcaagcccctgtactactctaccatcatgacacaacgggtgtgtctctggctgtccttcaggtcctcggccagtggggcactagtgtctttagtagataccagctttactttccatcttccctactggggacagaatataatcaatcactacttttgtgaacctcctgccctcctgaagctggcttccatagacacttacagcacagaaatggccatcttttcaatgggcgtggtaatcctcctggcccctgtctccctgattcttggttcttattggaatattatctccactgttatccagatgcagtctggggaagggagactcaaggctttttccacctgtggctcccatcttattgttgttgtcctcttctatgggtcaggaatattcacctacatgcgaccaaactccaagactacaaaagaactggataaaatgatatctgtgttctatacagcggtgactccaatgttgaaccccataatttatagcttgaggaacaaagaagttaaaaaggccataaagaggttgttcaagagaaagtgctgcaggagaaggtgagcggccgc

SEQ ID NO: 396 - DNA, 1112 bp, synthetic construct
  source 1..1112: mol_type = other DNA; note = mmLucy-FLAG-rho-OR2F1
ggatccgccaccatgagccaccagatcctgctgctcctggccctgctgaccctaggcctggctgattacaaggacgacgacgataagatcgaattgatgaacgggaccgagggcccaaacttctacgtgcctttctccaacaagacgggcgtggtggaattcatgggaacagataaccagacttgggtgagtgaatttattctcctcggcctgtccagtgactgggacactcgggtctccctgtttgtcctgttcttggtcatgtatgtggtgaccgtgctggggaactgtctcattgtccttctgatcagactggacagccgactccacactcccatgtatttctttctcaccaacctctcccttgtcgatgtctcctatgccacaagtgtagtccctcagctgctggcacattttcttgcagaacataaagccatcccattccagagctgtgcagcccagttatttttctccctggccttgggtgggattgagtttgttctcctggcggtgatggcctatgaccgctatgtggctgtgtgtgatgccctgcgatactcggccatcatgcatggagggctgtgtgctaggttggccatcacatcctgggtcagtggcttcatcagctctcctgtgcagactgctatcacctttcagctgcccatgtgcagaaacaagtttattgatcacatatcctgtgaactcctagctgtggtcaggctggcttgtgtggacacctcctccaatgaggtcaccatcatggtgtctagcattgttcttctgatgacacccttctgcctggttcttttgtcctacatccagatcatctccaccatcctaaagatccagtccagagaaggaagaaagaaagctttccacacgtgtgcctctcacctcacagtggttgccctgtgctatggtgtggccattttcacttacatccagccccactccagtccctctgtccttcaggagaagttgttctctgtcttttatgccattttaacaccaatgctgaaccccatgatttacagcctaaggaacaaagaagttaaaaaggccataaagaggttgttcaagagaaagtgctgcaggagaaggtgagcggccgc

SEQ ID NO: 397 - DNA, 1112 bp, synthetic construct
  source 1..1112: mol_type = other DNA; note = mmLucy-FLAG-rho-OR2F2
ggatccgccaccatgagccaccagatcctgctgctcctggccctgctgaccctaggcctggctgattacaaggacgacgacgataagatcgaattgatgaacgggaccgagggcccaaacttctacgtgcctttctccaacaagacgggcgtggtggaattcatggaaatagataaccagacgtgggtgagagaatttattctccttggcttatccagtgactggtgcactcagatatccctgttttccctgttcttggtcacatacctcatgacagtgctggggaactgtctcattgtccttctgatcagactggacagccgactccacactcccatgtatttctttctcaccaacctctcccttgtcgatgtctcctatgccacaagcgtagtcccccagctgctggcacattttcttgcagaacataaagccatcccattccagagctgtgcagcccagttatttttctccctggccttgggtgggattgagtttgttctcctggcagtgatggcctatgaccgccatgtggctgtgtctgaccgcctgcgatactcggccatcatgcatggagggctgtgtgctaggttggccatcacatcctgggtcagtggctccatcaactctcttgtgcagactgctatcacctttcagctgcccatgtgcactaacaagtttattgatcacatatcctgtgaactcctagctgtggtcaggctggcttgtgtggacacctcctccaatgaggctgccatcatggtgtctagcattgttcttctgatgacacctttctgcctggttctgttgtcctacatccggatcatctccaccatcctaaagatccagtccagagaaggaagaaagaaagccttccacacgtgtgcctctcacctcacggtggttgccctgtgctacggcacaacgattttcacttacatccagccccactctggtccctcagtccttcaagagaagctgatctctgtcttctatgccattgttatgcctctgctgaaccctgtgatttatagtctaaggaacaaagaagttaaaaaggccataaagaggttgttcaagagaaagtgctgcaggagaaggtgagcggccgc

SEQ ID NO: 398 - DNA, 1121 bp, synthetic construct
  source 1..1121: mol_type = other DNA; note = mmLucy-FLAG-rho-OR2G2
ggatccgccaccatgagccaccagatcctgctgctcctggccctgctgaccctaggcctggctgattacaaggacgacgacgataagatcgaattgatgaacgggaccgagggcccaaacttctacgtgcctttctccaacaagacgggcgtggtggaattcatggggatggtgagacataccaatgagagcaacctagcaggtttcatccttttagggttttctgattatcctcagttacagaaggttctatttgtgctcatattgattctgtatttactaactattttggggaataccaccatcattctggtttctcgtctggaacccaagcttcatatgccgatgtatttcttcctttctcatctctccttcctgtaccgctgcttcaccagcagtgttattccccagctcctggtaaacctgtgggaacccatgaaaactatcgcctatggtggctgtttggttcacctttacaactcccatgccctgggatccactgagtgcgtcctcccggctgtgatgtcctgtgaccgctatgtggctgtctgccgtcctctccattacactgtcttaatgcatatccatctctgcatggccttggcatctatggcatggctcagtggaatagccaccaccctggtacagtccaccctcaccctgcagctgcccttctgtgggcatcgccaagtggatcatttcatctgcgaggtccctgtgctcatcaagctggcttgtgtgggcaccacgtttaacgaggctgagctttttgtggctagtatccttttccttatagtgcctgtctcattcatcctggtctcctctggctacattgcccacgcagtgttgaggattaagtcagctaccaggagacagaaagcattcgggacctgcttctcccacctgacagtggtcaccatcttttatggaaccatcatcttcatgtatctgcagccagccaagagtagatccagggaccagggcaagtttgtttctctcttctacactgtggtaacccgcatgcttaaccctcttatttataccttgaggaacaaagaagttaaaaaggccataaagaggttgttcaagagaaagtgctgcaggagaaggtgagcggccgc

SEQ ID NO: 399 - DNA, 1121 bp, synthetic construct
  source 1..1121: mol_type = other DNA; note = mmLucy-FLAG-rho-OR2G2(V120L,L167P,R236G)
ggatccgccaccatgagccaccagatcctgctgctcctggccctgctgaccctaggcctggctgattacaaggacgacgacgataagatcgaattgatgaacgggaccgagggcccaaacttctacgtgcctttctccaacaagacgggcgtggtggaattcatggggatggtgagacataccaatgagagcaacctagcaggtttcatccttttagggttttctgattatcctcagttacagaaggttctatttgtgctcatattgattctgtatttactaactattttggggaataccaccatcattctggtttctcgtctggaacccaagcttcatatgccgatgtatttcttcctttctcatctctccttcctgtaccgctgcttcaccagcagtgttattccccagctcctggtaaacctgtgggaacccatgaaaactatcgcctatggtggctgtttggttcacctttacaactcccatgccctgggatccactgagtgcgtcctcccggctctgatgtcctgtgaccgctatgtggctgtctgccgtcctctccattacactgtcttaatgcatatccatctctgcatggccttggcatctatggcatggctcagtggaatagccaccaccctggtacagtccaccctcaccccgcagctgcccttctgtgggcatcgccaagtggatcatttcatctgcgaggtccctgtgctcatcaagctggcttgtgtgggcaccacgtttaacgaggctgagctttttgtggctagtatccttttccttatagtgcctgtctcattcatcctggtctcctctggctacattgcccacgcagtgttgaggattaagtcagctaccgggagacagaaagcattcgggacctgcttctcccacctgacagtggtcaccatcttttatggaaccatcatcttcatgtatctgcagccagccaagagtagatccagggaccagggcaagtttgtttctctcttctacactgtggtaacccgcatgcttaaccctcttatttataccttgaggaacaaagaagttaaaaaggccataaagaggttgttcaagagaaagtgctgcaggagaaggtgagcggccgc

SEQ ID NO: 400 - DNA, 1112 bp, synthetic construct
  source 1..1112: mol_type = other DNA; note = mmLucy-FLAG-rho-OR2G3
ggatccgccaccatgagccaccagatcctgctgctcctggccctgctgaccctaggcctggctgattacaaggacgacgacgataagatcgaattgatgaacgggaccgagggcccaaacttctacgtgcctttctccaacaagacgggcgtggtggaattcatgggattgggcaatgagagttccctaatggatttcatccttctaggcttctcagaccaccctcgtctggaggctgttctctttgtatttgtccttttcttctacctcctgacccttgtgggaaacttcaccataatcatcatctcatatctggatccccctcttcataccccaatgtacttttttctcagcaacctctctttactggacatctgcttcactactagccttgctcctcagaccttagttaacttgcaaagaccaaagaagacgatcacttacggtggttgtgtggcgcaactctatatttctctggcactgggctccactgaatgtatcctcttggctgacatggccttggatcggtacattgctgtctgcaaacccctccactatgtagtcatcatgaacccacggctttgccaacagctggcatctatctcctggctcagtggtttggctagttccctaatccatgcaacttttaccttgcaattgcctctctgtggcaaccataggctggaccattttatttgcgaagtaccagctcttctcaagttggcttgtgtggacaccactgtcaatgaattggtgctttttgttgttagtgttctgtttgttgtcattccaccagcactcatctccatctcctatggcttcataactcaagctgtgctgaggatcaaatcagtagaggcaaggcacaaagccttcagcacctgctcctcccaccttacagtggtgattatattctatggcaccataatctacgtgtacctgcaacctagtgacagctatgcccaggaccaagggaagtttatctccctcttctacaccatggtgacccccactttaaatcctatcatctatactttaaggaacaaagaagttaaaaaggccataaagaggttgttcaagagaaagtgctgcaggagaaggtgagcggccgc

SEQ ID NO: 401 - DNA, 1112 bp, synthetic construct
  source 1..1112: mol_type = other DNA; note = mmLucy-FLAG-rho-OR2G6
ggatccgccaccatgagccaccagatcctgctgctcctggccctgctgaccctaggcctggctgattacaaggacgacgacgataagatcgaattgatgaacgggaccgagggcccaaacttctacgtgcctttctccaacaagacgggcgtggtggaattcatggaggaaaccaacaacagctctgaaaagggatttcttctcctgggattttcagatcagcctcagctagagaggtttctttttgccatcattttgtacttctacgtcttgagccttctggggaacactgccctcatactagtatgttgtctggactccagactccacactccaatgtacttcttcctcagcaacctctcgtgtgtggacatctgctttaccaccagtgttgccccacagttgctggttaccatgaataagaaagacaaaaccatgagctacggtggctgtgtggcccagctctatgtggccatggggttgggctcgtctgagtgtattctcttggccgtcatggcttatgaccgctatgctgctgtctgccggccactgcgctacatagccattatgcaccccaggttctgtgcgtctctggccggtggagcatggctcagcggcctcatcacctccctaattcagtgctccctcactgtgcagctgcccctctgtggtcatcgcacactggatcatattttctgtgaggtgccagtgctcatcaaactggcctgtgtggatacgactttcaacgaggcagaactctttgtggccagtgtagtctttctaattgtcccggtgttactcatcttagtctcctatggctttatcactcaagctgtgttaaggataaaatcagctgcgggccgccaaaaggcctttgggacctgttcgtctcacctggttgtggtcatcattttctatgggaccatcatattcatgtaccttcaaccggccaataggagatccaaaaaccagggaaagtttgtttctcttttctataccatagtcaccccacttttaaaccccattatctacactctgaggaacaaagaagttaaaaaggccataaagaggttgttcaagagaaagtgctgcaggagaaggtgagcggccgc

SEQ ID NO: 402 - DNA, 1106 bp, synthetic construct
  source 1..1106: mol_type = other DNA; note = mmLucy-FLAG-rho-OR2H1
ggatccgccaccatgagccaccagatcctgctgctcctggccctgctgaccctaggcctggctgattacaaggacgacgacgataagatcgaattgatgaacgggaccgagggcccaaacttctacgtgcctttctccaacaagacgggcgtggtggaattcatggttaaccaaagctcccccatgggcttcctccttctgggcttctctgaacacccagcactggaaaggactctctttgtggttgtcttcacttcctacctcttgaccctggtgggcaacacactcatcatcctgctgtctgtactgtaccccaggctccactctccaatgtactttttcctctctgacctctccttcttggacctctgctttaccacaagttgtgtcccccagatgctggtcaacctctggggcccaaagaagaccatcagcttcctgggatgctctgtccagctcttcatcttcctgtccctggggaccactgagtgcatcctcctgacagtgatggcctttgaccgatacgtggctgtctgccagcccctccactatgccaccatcatccacccccgcctgtgctggcagctggcatctgtggcctgggttatgagtctggttcaatcgatagtccagacaccatccaccctccacttgcccttctgtccccaccagcagatagatgactttttatgtgaggtcccatctctgattcgactctcctgtggagatacctcctacaatgaaatccagttggctgtgtccagtgtcatcttcgtggttgtgcctctcagcctcatccttgcctcttatggagccactgcccaggcagtgctgaggattaactctgccacagcatggagaaaggcctttgggacctgctcctcccatctcactgtggtcaccctcttctacagctcagtcattgctgtctacctccagcccaaaaatccgtatgcccaagggaggggcaagttctttggtctcttctatgcagtgggcactccttcacttaaccctctcgtatacaccctgaggaacaaagaagttaaaaaggccataaagaggttgttcaagagaaagtgctgcaggagaaggtgagcggccgc

SEQ ID NO: 403 - DNA, 1106 bp, synthetic construct
  source 1..1106: mol_type = other DNA; note = mmLucy-FLAG-rho-OR2H2(L30F)
ggatccgccaccatgagccaccagatcctgctgctcctggccctgctgaccctaggcctggctgattacaaggacgacgacgataagatcgaattgatgaacgggaccgagggcccaaacttctacgtgcctttctccaacaagacgggcgtggtggaattcatggttaaccaaagctccacaccgggcttcctccttctgggcttctctgaacacccagggctggaaaggactctcttcgtggttgtcttcacttcctacctcctaaccctagtgggcaacacactcatcatcctgctgtctgcgctggaccccaagctccactctccaatgtactttttcctctccaacctctccttcttggacctctgtttcaccacgagttgtgttccccaaatgctggtcaacctctggggcccaaagaagaccatcagcttcctggactgctctgtccagatcttcatcttcctgtccctggggacaactgagtgcatcctcttgacagtgatggcttttgatcgctacgtggctgtctgccagcccctccactatgccaccatcatccacccccgcctgtgctggcagctggcatctgtggcctgggtcattgggctagtggagtcagtggtccagacaccatccaccctgcacctgcccttctgccccgatcggcaggtggatgattttgtctgtgaggtcccagctctaattcgactctcctgtgaagacacctcctacaatgagatccaggtggctgttgccagtgtcttcatcttggttgtgcctctcagcctcatccttgtctcttacggagccattacctgggcagtgctgaggattaactctgcaaaagggcggaggaaagcttttgggacctgctcctcccatctcactgtggtcaccctcttctacagctcagtcattgctgtctacctccagcccaaaaatccctatgcccaagagaggggcaagttctttggtctcttctatgcagtgggcactccttcacttaaccctctcatatacaccctgaggaacaaagaagttaaaaaggccataaagaggttgttcaagagaaagtgctgcaggagaaggtgagcggccgc

SEQ ID NO: 404 - DNA, 1106 bp, synthetic construct
  source 1..1106: mol_type = other DNA; note = mmLucy-FLAG-rho-OR2H2(L30F,A48V)
ggatccgccaccatgagccaccagatcctgctgctcctggccctgctgaccctaggcctggctgattacaaggacgacgacgataagatcgaattgatgaacgggaccgagggcccaaacttctacgtgcctttctccaacaagacgggcgtggtggaattcatggttaaccaaagctccacaccgggcttcctccttctgggcttctctgaacacccagggctggaaaggactctcttcgtggttgtcttcacttcctacctcctaaccctagtgggcaacacactcatcatcctgctgtctgtgctggaccccaagctccactctccaatgtactttttcctctccaacctctccttcttggacctctgtttcaccacgagttgtgttccccaaatgctggtcaacctctggggcccaaagaagaccatcagcttcctggactgctctgtccagatcttcatcttcctgtccctggggacaactgagtgcatcctcttgacagtgatggcttttgatcgctacgtggctgtctgccagcccctccactatgccaccatcatccacccccgcctgtgctggcagctggcatctgtggcctgggtcattgggctagtggagtcagtggtccagacaccatccaccctgcacctgcccttctgccccgatcggcaggtggatgattttgtctgtgaggtcccagctctaattcgactctcctgtgaagacacctcctacaatgagatccaggtggctgttgccagtgtcttcatcttggttgtgcctctcagcctcatccttgtctcttacggagccattacctgggcagtgctgaggattaactctgcaaaagggcggaggaaagcttttgggacctgctcctcccatctcactgtggtcaccctcttctacagctcagtcattgctgtctacctccagcccaaaaatccctatgcccaagagaggggcaagttctttggtctcttctatgcagtgggcactccttcacttaaccctctcatatacaccctgaggaacaaagaagttaaaaaggccataaagaggttgttcaagagaaagtgctgcaggagaaggtgagcggccgc

SEQ ID NO: 405 - DNA, 1115 bp, synthetic construct
  source 1..1115: mol_type = other DNA; note = mmLucy-FLAG-rho-OR2J2
ggatccgccaccatgagccaccagatcctgctgctcctggccctgctgaccctaggcctggctgattacaaggacgacgacgataagatcgaattgatgaacgggaccgagggcccaaacttctacgtgcctttctccaacaagacgggcgtggtggaattcatgatgattaaaaaaaatgcaagttcggaagacttctttattctacttggattttctaattggcctcagctggaagtagttctctttgtggttatcttgatcttctacctgatgacactgacaggaaacctgttcatcatcatcctgtcatacgtggactcccatctccacacaccaatgtacttcttcctttcaaacctctcatttctggatctctgctacaccaccagctctatccctcagttgctggtgaatctccggggcccggaaaagaccatctcgtatgctggttgcatggttcaactttactttgttcttgcactgggaatcgcagagtgtgtcctactggtggtgatgtcgtatgatcgttatgtagctgtgtgtagacctttgcattacactgtcctcatgcaccctcgtttctgccacttgttggttgcggcttcttgggtaattggttttactatctcagcacttcattcctcctttactttctgggtacccctttgtggacatcgcctagtggatcacttcttctgtgaagttccagcacttctgcgtttatcatgtgttgacacccatgcaaatgagctgaccctcatggtcatgagctccatttttgttctcatacctctcattctgattctcactacctatggtgccattgcccgggctgtactgagcatgcaatcaaccactgggcttcagaaagtgtttaggacatgtggagcccatcttatggttgtatctctctttttcattccagtcatgtgcatgtatctccagccaccatcagaaaattctcctgatcagggcaagttcattgccctcttttatactgttgtcacaccgagtcttaatcctctaatctacactctcaggaacaaagaagttaaaaaggccataaagaggttgttcaagagaaagtgctgcaggagaaggtgagcggccgc

SEQ ID NO: 406 - DNA, 1115 bp, synthetic construct
  source 1..1115: mol_type = other DNA; note = mmLucy-FLAG-rho-OR2J2(Y74H,V146A,T218A)
ggatccgccaccatgagccaccagatcctgctgctcctggccctgctgaccctaggcctggctgattacaaggacgacgacgataagatcgaattgatgaacgggaccgagggcccaaacttctacgtgcctttctccaacaagacgggcgtggtggaattcatgatgattaaaaaaaatgcaagttcggaagacttctttattctacttggattttctaattggcctcagctggaagtagttctctttgtggttatcttgatcttctacctgatgacactgacaggaaacctgttcatcatcatcctgtcatacgtggactcccatctccacacaccaatgtacttcttcctttcaaacctctcatttctggatctctgccacaccaccagctctatccctcagttgctggtgaatctccggggcccggaaaagaccatctcgtatgctggttgcatggttcaactttactttgttcttgcactgggaatcgcagagtgtgtcctactggtggtgatgtcgtatgatcgttatgtagctgtgtgtagacctttgcattacactgtcctcatgcaccctcgtttctgccacttgttggctgcggcttcttgggtaattggttttactatctcagcacttcattcctcctttactttctgggtacccctttgtggacatcgcctagtggatcacttcttctgtgaagttccagcacttctgcgtttatcatgtgttgacacccatgcaaatgagctgaccctcatggtcatgagctccatttttgttctcatacctctcattctgattctcactgcctatggtgccattgcccgggctgtactgagcatgcaatcaaccactgggcttcagaaagtgtttaggacatgtggagcccatcttatggttgtatctctctttttcattccagtcatgtgcatgtatctccagccaccatcagaaaattctcctgatcagggcaagttcattgccctcttttatactgttgtcacaccgagtcttaatcctctaatctacactctcaggaacaaagaagttaaaaaggccataaagaggttgttcaagagaaagtgctgcaggagaaggtgagcggccgc

SEQ ID NO: 407 - DNA, 1121 bp, synthetic construct
  source 1..1121: mol_type = other DNA; note = mmLucy-FLAG-rho-OR2J3(M261I)
ggatccgccaccatgagccaccagatcctgctgctcctggccctgctgaccctaggcctggctgattacaaggacgacgacgataagatcgaattgatgaacgggaccgagggcccaaacttctacgtgcctttctccaacaagacgggcgtggtggaattcatgaatgatgatggaaaagtcaatgctagctctgaggggtactttattttagttggattttctaattggcctcatctggaagtagttatctttgtggttgtcttgatcttctacttgatgacactgataggaaacctgttcatcatcatcctgtcatacctggactcccatctgcacacaccaatgtacttcttcctttcaaacctctcatttctggatctctgctacaccaccagctctatccctcagttgctggtcaatctctggggcccggaaaagaccatctcttatgctggttgcatgattcaactttactttgttctcgcactgggaaccacagagtgtgtcctactggtggtgatgtcctatgaccgttatgcagctgtgtgtagacctttgcattacactgtcctcatgcaccctcgtttctgccacctgctggctgtggcttcttgggtaagtggttttaccaactcagcacttcattcctccttcaccttctgggtacctctgtgtggacaccgccaagtagatcactttttctgtgaagttccagcacttctgcgattatcgtgtgttgatacccatgtcaatgagctgaccctcatgatcacaagctccatatttgttctcatacctctcatcctcattctcacttcttatggtgccatcgtccgagctgtactgaggatgcagtcaaccactgggcttcagaaagtgtttggaacatgtggagctcatcttatggctgtatctctctttttcattccggccatgtgcatatatctccagccaccatcaggaaattctcaagatcaaggcaagttcattgccctcttttatactgttgtcacacctagtcttaaccctctaatctacaccctcaggaacaaagaagttaaaaaggccataaagaggttgttcaagagaaagtgctgcaggagaaggtgagcggccgc

SEQ ID NO: 408 - DNA, 1109 bp, synthetic construct
  source 1..1109: mol_type = other DNA; note = mmLucy-FLAG-rho-OR2K2
ggatccgccaccatgagccaccagatcctgctgctcctggccctgctgaccctaggcctggctgattacaaggacgacgacgataagatcgaattgatgaacgggaccgagggcccaaacttctacgtgcctttctccaacaagacgggcgtggtggaattcatgcaaggagaaaacttcaccatttggagcatttttttcttggagggattttcccagtacccagggttagaagtggttctcttcgtcttcagccttgtaatgtatctgacaacgctcttgggcaacagcactcttattttgatcactatcctagattcacgccttaaaacccccatgtacttattccttggaaatctctctttcatggatatttgttacacatctgcctctgttcctactttgctggtgaacttgctgtcatcccagaaaaccattatcttttctgggtgtgctgtacagatgtatctgtcccttgccatgggctccacagagtgtgtgctcctggccgtgatggcatatgaccgttatgtggccatttgtaacccgctgagatactccatcatcatgaacaggtgcgtctgtgcacggatggctacggtctcctgggtgacgggttgcctgaccgctctgctggaaaccagttttgccctgcagatacccctctgtgggaatctcatcgatcacttcacgtgtgaaattctggcggtgctaaagttagcttgcacaagttcactgctcatgaacaccatcatgctggtggtcagcattctcctcttgccaattccaatgctcttagtttgcatctcttacatcttcatcctttccactattctgagaatcacctcagcagagggaagaaacaaggctttttctacctgtggtgcccatttgactgtggtgattttgtattatggggctgccctctctatgtacctaaagccttcttcatcaaatgcacaaaaaatagacaaaatcatctcgttgctttacggagtgcttacccctatgttgaaccccataatttacagtttaaggaacaaagaagttaaaaaggccataaagaggttgttcaagagaaagtgctgcaggagaaggtgagcggccgc

SEQ ID NO: 409 - DNA, 1109 bp, synthetic construct
  source 1..1109: mol_type = other DNA; note = mmLucy-FLAG-rho-OR2L13
ggatccgccaccatgagccaccagatcctgctgctcctggccctgctgaccctaggcctggctgattacaaggacgacgacgataagatcgaattgatgaacgggaccgagggcccaaacttctacgtgcctttctccaacaagacgggcgtggtggaattcatggagaaatggaatcacacttcaaatgatttcattttgttgggtctgcttcccccaaatcaaactggaatatttctcttgtgccttatcatcctcatattctttctggcctcggtgggtaactcggccatgattcacctcatccacgtggatcctcgtctccacacaccgatgtactttcttctcagccagctctcccttatggacctgatgtacatctccaccaccgtccccaagatggcgtacaacttcctgtccggccagaaaggcatctccttcctgggatgtggtgtgcaaagcttcttcttcctgaccatggcgtgttctgaaggcttactcctgacctccatggcctacgaccgttatttggccatctgccactctctctattatcctatccgcatgagtaaaatgatgtgtgtgaagatgattggaggctcttggacactggggtccatcaactccttggcacacacagtctttgcccttcatattccctactgcaggtctagggctattgaccatttcttctgcgatgtcccagccatgttgcttcttgcctgtacagatacttgggtctatgaatatatggtttttgtaagtacaagcctctttctccttttccctttcattggcatcacttcttcctgtggccgagtcctatttgctgtctatcatatgcactcaaaggaggggagaaaaaaggccttcaccaccatttcaacacatttaactgtagtgatcttttactatgcaccttttgtctacacctatcttcggcccaggaatctccgctcaccagctgaagacaagatcctggcagtcttctacaccatccttacccccatgctcaatcccattatctacagcctgaggaacaaagaagttaaaaaggccataaagaggttgttcaagagaaagtgctgcaggagaaggtgagcggccgc

SEQ ID NO: 410 - DNA, 1109 bp, synthetic construct
  source 1..1109: mol_type = other DNA; note = mmLucy-FLAG-rho-OR2L2
ggatccgccaccatgagccaccagatcctgctgctcctggccctgctgaccctaggcctggctgattacaaggacgacgacgataagatcgaattgatgaacgggaccgagggcccaaacttctacgtgcctttctccaacaagacgggcgtggtggaattcatggaaaattacaatcaaacatcaactgatttcatcttattggggctgttcccacaatcaagaattggccttttcgtattcaccctcatttttctcattttcctaatggctctaattggaaatctatccatgattcttctcatctttttggacatccatctccacacacctatgtatttcctacttagtcagctctccctcattgacctaaattacatctccaccattgttccaaagatggtttatgattttctgtatggaaacaagtctatctccttcactggatgtgggattcagagtttcttcttcttgactttagcagttgcagaagggctgctcctgacatcaatggcctatgatcgttatgtggccatttgctttcctctccactatcccatccgtataagcaaaagagtgtgtgtgatgatgataacaggatcttggatgataagctctatcaactcttgtgctcacacagtatatgcactctgtatcccatattgcaagtccagagccatcaatcattttttctgtgatgttccagctatgttgacgctagcctgcacagacacttgggtctatgagagcacagtgtttttgagcagcaccatctttcttgtgcttcctttcactggtattgcatgttcctatggccgggttctccttgctgtctaccgcatgcactctgcagaagggaggaagaaggcctattcaacctgtagcacccacctcactgtagtgtccttctactatgcaccctttgcttatacctatgtacgtccaagatccctgcgatctccaacagaggacaagattctggctgttttctacaccatcctcaccccaatgctcaaccccatcatctacagcctgaggaacaaagaagttaaaaaggccataaagaggttgttcaagagaaagtgctgcaggagaaggtgagcggccgc

SEQ ID NO: 411 - DNA, 1109 bp, synthetic construct
  source 1..1109: mol_type = other DNA; note = mmLucy-FLAG-rho-OR2L2(V259L)
ggatccgccaccatgagccaccagatcctgctgctcctggccctgctgaccctaggcctggctgattacaaggacgacgacgataagatcgaattgatgaacgggaccgagggcccaaacttctacgtgcctttctccaacaagacgggcgtggtggaattcatggaaaattacaatcaaacatcaactgatttcatcttattggggctgttcccacaatcaagaattggccttttcgtattcaccctcatttttctcattttcctaatggctctaattggaaatctatccatgattcttctcatctttttggacatccatctccacacacctatgtatttcctacttagtcagctctccctcattgacctaaattacatctccaccattgttccaaagatggtttatgattttctgtatggaaacaagtctatctccttcactggatgtgggattcagagtttcttcttcttgactttagcagttgcagaagggctgctcctgacatcaatggcctatgatcgttatgtggccatttgctttcctctccactatcccatccgtataagcaaaagagtgtgtgtgatgatgataacaggatcttggatgataagctctatcaactcttgtgctcacacagtatatgcactctgtatcccatattgcaagtccagagccatcaatcattttttctgtgatgttccagctatgttgacgctagcctgcacagacacttgggtctatgagagcacagtgtttttgagcagcaccatctttcttgtgcttcctttcactggtattgcatgttcctatggccgggttctccttgctgtctaccgcatgcactctgcagaagggaggaagaaggcctattcaacctgtagcacccacctcactgtagtgtccttctactatgcaccctttgcttatacctatctacgtccaagatccctgcgatctccaacagaggacaagattctggctgttttctacaccatcctcaccccaatgctcaaccccatcatctacagcctgaggaacaaagaagttaaaaaggccataaagaggttgttcaagagaaagtgctgcaggagaaggtgagcggccgc

SEQ ID NO: 412 - DNA, 1109 bp, synthetic construct
  source 1..1109: mol_type = other DNA; note = mmLucy-FLAG-rho-OR2L3
ggatccgccaccatgagccaccagatcctgctgctcctggccctgctgaccctaggcctggctgattacaaggacgacgacgataagatcgaattgatgaacgggaccgagggcccaaacttctacgtgcctttctccaacaagacgggcgtggtggaattcatggaaaattacaatcaaacatcaactgatttcatcttattaggattcttcccaccatcaagaattggccttttcctcttcatcctcattgttttcattttcctaatggctctaattggaaacctatccatgattcttctcatcttcttggacacccatctccacacacccatgtatttcctacttagtcagctctccctcattgacctaaattacatctccaccattgttcctaagatggcatctgattttctgtctggtaacaagtctatctccttcactgggtgtgggattcagagtttcttcttctcggcattaggaggtgcagaagcactacttttggcatctatggcctatgatcgttacattgctatttgctttcctcttcactatcccatccgcatgagcaaaagaatgtgtgtgctgatgataacagggtcttggatcataggctcgatcaatgcttgtgctcacactgtatatgtactccatattccttattgccaatccagggccatcaatcatttcttctgtgatgtcccagcaatggtgactctggcctgcatggacacctgggtctatgagggcacagtgtttttgagcaccaccatctttctcgtgtttcccttcattgctatttcatgttcctatggccgggttctccttgctgtctaccacatgaaatctgcagaagggaggaagaaagcctacctgacctgcagcacccacctcactgtagtaactttctactatgcaccttttgtctacacttatctacgtccaagatccctgcgatctccaacagaggacaaggttctggctgtcttctacaccaccctcactccaatgctcaaccccatcatctatagcctgaggaacaaagaagttaaaaaggccataaagaggttgttcaagagaaagtgctgcaggagaaggtgagcggccgc

SEQ ID NO: 413 - DNA, 1109 bp, synthetic construct
  source 1..1109: mol_type = other DNA; note = mmLucy-FLAG-rho-OR2L5
ggatccgccaccatgagccaccagatcctgctgctcctggccctgctgaccctaggcctggctgattacaaggacgacgacgataagatcgaattgatgaacgggaccgagggcccaaacttctacgtgcctttctccaacaagacgggcgtggtggaattcatggaaaattacaatcaaacgtcaactgatttcatcttattggggctgttcccaccatcaaaaattggccttttcctcttcattctctttgttctcattttcctaatggctctaattggaaacctatccatgattcttctcatcttcttggacacccatctccacacacccatgtatttcctgcttagtcagctctccctcattgacctaaattacatctctacgattgttcctaagatggcttctgattttctgtatggaaacaagtctatctccttcattgggtgtgggattcagagtttcttcttcatgacttttgcaggtgcagaagcgctgctcctgacatcaatggcctatgatcgttatgtggccatttgctttcctctccactatcccatccgtatgagcaaaagaatgtatgtgctgatgataacaggatcttggatgataggctccatcaactcttgtgctcacacagtatatgcattccgtatcccatattgcaagtccagagccatcaatcattttttctgtgatgttccagctatgttgacattagcctgtacagacacctgggtctatgagtacacagtgtttttgagcagcaccatctttcttgtgtttcccttcactggcattgcgtgttcctatggctgggttctccttgctgtctaccgcatgcactctgcagaagggaggaaaaaggcctattcgacctgcagcacccacctcactgtagtaactttctactatgcaccctttgcttatacctatctatgtccaagatccctgcgatctctgacagaggacaaggttctggctgttttctacaccatcctcaccccaatgctcaaccccatcatctacagcctgaggaacaaagaagttaaaaaggccataaagaggttgttcaagagaaagtgctgcaggagaaggtgagcggccgc

SEQ ID NO: 414 - DNA, 1109 bp, synthetic construct
  source 1..1109: mol_type = other DNA; note = mmLucy-FLAG-rho-OR2L8(G196C,A202T,Y217C,H226R)
ggatccgccaccatgagccaccagatcctgctgctcctggccctgctgaccctaggcctggctgattacaaggacgacgacgataagatcgaattgatgaacgggaccgagggcccaaacttctacgtgcctttctccaacaagacgggcgtggtggaattcatggaaaattacaatcaaacatcaactgatttcatcttattggggctgtttccaccatcaagaattgaccttttcttcttcattctcattgttttcattttcctgatggctctaattggaaacctgtccatgattcttctcatcttcttggacacccatctccacacacccatgtatttcctactgagtcagctctccctcattgacctaaattacatctccaccattgttcctaagatggcatctgattttctgcatggaaacaagtctatctccttcactgggtgtgggattcagagtttcttcttcttggcattaggaggtgcagaagcactacttttggcatctatggcctatgatcgttacattgctatttgctttcctctccactatctcatccgcatgagcaaaagagtgtgtgtgctgatgataacagggtcttggatcataggctcgatcaatgcttgtgctcacactgtatatgtactccatattccttattgccgatccagggccatcaatcatttcttctgtgatgtcccagcaatggtgactctggcctgcatggacacctgggtctatgagtgcacagtgtttttgagtaccaccatctttctcgtgtttcccttcattggtatttcatgttcctgtggccaggttctctttgctgtctaccgcatgaaatctgcagaagggaggaagaaagcctatttgacctgcagcacccacctcactgtagtaactttctactatgcaccttttgtctacacttatctacgtccaagatccctgcgatctccaacagaggacaaggttctggctgtcttctacaccatcctcaccccaatgctcaaccccatcatctatagcctgaggaacaaagaagttaaaaaggccataaagaggttgttcaagagaaagtgctgcaggagaaggtgagcggccgc

SEQ ID NO: 415 - DNA, 1112 bp, synthetic construct
  source 1..1112: mol_type = other DNA; note = mmLucy-FLAG-rho-OR2M2
ggatccgccaccatgagccaccagatcctgctgctcctggccctgctgaccctaggcctggctgattacaaggacgacgacgataagatcgaattgatgaacgggaccgagggcccaaacttctacgtgcctttctccaacaagacgggcgtggtggaattcatggcatgggagaatcagaccttcaactccgacttcatcctccttggaatcttcaatcacagcccaccacacacgttcctcttctttctggtcctgggcatctttttagtggccttcatgggaaactctgtcatggttctcctcatctacctggacacccagctccacacccccatgtacttcctcctcagccaactgtccctcatggacctcatgctcatctgcaccaccgtacccaagatggccttcaactacctgtctggcagcaagtccatttctatggctggttgtgtcacacaaattttcttctatatatcactgtctggctctgaatgttttcttttggctgttatggcttatgaccgctatattgctatttgccaccctctaagatataccaatctcatgaatcctaaaatttgtggacttatggctaccttctcctggatcctgggctctacagatggaatcattgatgctgtagccacattttccttctccttttgtgggtctcgggaaatagcccacttcttctgtgaattcccttccctactaatcctctcatgcaatgacacatcaatatttgaagaggttattttcatctgctgtatagtaatgcttgttttccctgttgcaatcatcattgcttcctatgctggagttattctggctgtcattcacatgggatctggagagggtcgtcgcaaagctttcacgacctgttcctctcacctcatggtggtgggaatgtactatggagcagctttgttcatgtacatacggcccacatctgatcactccccaacgcaggacaagatggtgtctgtattctacaccatcctcactcccatgctgaatcccctcatctacagcctcaggaacaaagaagttaaaaaggccataaagaggttgttcaagagaaagtgctgcaggagaaggtgagcggccgc

SEQ ID NO: 416 - DNA, 1112 bp, synthetic construct
  source 1..1112: mol_type = other DNA; note = mmLucy-FLAG-rho-OR2M3
ggatccgccaccatgagccaccagatcctgctgctcctggccctgctgaccctaggcctggctgattacaaggacgacgacgataagatcgaattgatgaacgggaccgagggcccaaacttctacgtgcctttctccaacaagacgggcgtggtggaattcatggcaagggagaattcgaccttcaactccgacttcatcctcctgggaatcttcaatcacagccccacccacaccttcctcttctttctggtcctggccatcttttcagtggccttcatgggaaactctgtcatggttctcctcatctacctggacacccagctccacacccccatgtacctcctcctcagccaactgtccctcatggacctcatgctcatctgcaccaccgtacccaagatggccttcaactacctgtctggcagcaagtccatttctatggctggttgtgccacacaaattttcttctatacatcactgcttggctctgagtgctttcttttggctgttatggcttatgaccgctacactgccatttgccaccctctaagatacaccaatctcatgagccctaaaatttgtggacttatgactgccttttcctggatcctgggctctacggatggaattattgatgttgtagcaacattttccttctcctactgtgggtctcgggaaatagcccacttcttctgtgacttcccctccctactaatcctctcatgcagtgacacatcaatatttgaaaagattcttttcatctgctgtatagtaatgattgttttccctgttgcaatcatcattgcttcctatgctcgagttatcctggctgtcattcacatgggatctggagagggtcgtcgcaaagcttttactacttgttcctctcacctcttggtggtgggaatgtactatggagcagctttgttcatgtacatacggcccacatctgatcgctccccaacacaggacaagatggtgtctgtattctacaccatcctcactcccatgttgaatcccctcatctacagcctcaggaacaaagaagttaaaaaggccataaagaggttgttcaagagaaagtgctgcaggagaaggtgagcggccgc

SEQ ID NO: 417 - DNA, 1112 bp, synthetic construct
  source 1..1112: mol_type = other DNA; note = mmLucy-FLAG-rho-OR2M4
ggatccgccaccatgagccaccagatcctgctgctcctggccctgctgaccctaggcctggctgattacaaggacgacgacgataagatcgaattgatgaacgggaccgagggcccaaacttctacgtgcctttctccaacaagacgggcgtggtggaattcatggtgtgggaaaaccagaccttcaactccatcttcatcctgctgggaatcttcaatcacagtcccacccacaccttccttttttctctggtcctgggcatcttctcactggcattgatggaaaatatttccatggttctcctcatctacatagagaaacagctccacacccccatgtacttcctcctcagtcaactgtcccttatggacctcatgctcatctgcaccactctacccaagatgatcttcagctacttgtctgggaagaaatctatctctctggcaggttgtggaactcagatattcttctatgtgtccctgcttggagctgaatgtttcttgttggctgtcatggcttatgaccgctatgtggctatatgtcaccctcttcagtacaccatcctcatgaatccgaaactctgtgtcttcatgactgttgcttcctggaccttggggtctcttgatgggatcatagtgcttgcagctgtcctgtcattttcttactgcagctctctggaaattcatcactttttctgtgatgttgctgcccttttacctctatcctgcacagaaacatctgcatttgaaagactacttgtcatttgttgtgtggtaatgctaatctttccagtttcagttatcatactttcctattcccatgtccttcgagccgtcatccacatgggctctggggaaagtcgtcgcaaggccttcactacctgctcctcccacctgtctgtggtcggactctactacggtgctgctatgttcatgtacatgagaccagcttctaaacatacgccagaccaggacaagatggtgtcggccttctacactattctcacccctatgctgaaccctctcatttatagcctcaggaacaaagaagttaaaaaggccataaagaggttgttcaagagaaagtgctgcaggagaaggtgagcggccgc

SEQ ID NO: 418 - DNA, 1112 bp, synthetic construct
  source 1..1112: mol_type = other DNA; note = mmLucy-FLAG-rho-OR2M5
ggatccgccaccatgagccaccagatcctgctgctcctggccctgctgaccctaggcctggctgattacaaggacgacgacgataagatcgaattgatgaacgggaccgagggcccaaacttctacgtgcctttctccaacaagacgggcgtggtggaattcatggcatgggagaatcagaccttcaactctgacttcatcctcctgggaatcttcaatcacagccccacccacaccttcctcttctttctggtcctggccatcttttcagtggccttcatgggaaactctgtcatggttctcctcatctacctggacacccagctccacacccccatgtacttcctcctcagtcaactgttcctcatggacctcatgctcatctgctctaccgtacccaagatggccttcaactacttgtctggcagcaagtccatttctatggctggttgtgccacacaaattttcttctatgtatcactgcttggctccgaatgctttctgttggctgttatgtcttatgaccgctatattgccatttgccaccctctaagatacaccaatctcatgagacccaaaatttgtggacttatgactgccttctcctggatcctgggctctatggatgcaatcattgatgctgtagcgacattttccttctcctactgtgggtctcgggaaatagcccacttcttctgtgacttcccttccctactaatcctctcatgcaatgacacatcaatatttgaaaaggttcttttcatctgctgtatagtaatgattgtttttcctgttgcaatcatcatcgcttcctatgctcgagttattctggctgtcattcacatgggatctggagagggtcgtcgcaaagcttttactacctgttcctctcacctcatggtggtgggaatgtactatggagcaggtttgttcatgtacatacggcccacatctgatcgctcccctatgcaggacaagctggtgtctgtattctacaccatcctcactcccatgctgaatcccctcatctacagcctcaggaacaaagaagttaaaaaggccataaagaggttgttcaagagaaagtgctgcaggagaaggtgagcggccgc

SEQ ID NO: 419 - DNA, 1112 bp, synthetic construct
  source 1..1112: mol_type = other DNA; note = mmLucy-FLAG-rho-OR2M7
ggatccgccaccatgagccaccagatcctgctgctcctggccctgctgaccctaggcctggctgattacaaggacgacgacgataagatcgaattgatgaacgggaccgagggcccaaacttctacgtgcctttctccaacaagacgggcgtggtggaattcatggcatgggagaatcagaccttcaactctgacttcctcctcctgggaatcttcaatcatagccccacccacaccttcctcttctttctggtcctggccatcttttcagtggccttcatgggaaactccatcatggttctcctcatctacctggatacccagctccacacccccatgtacttcctcctcagccaactgtccctcatggacctcatgctcatctgcaccactgtacccaagatggccttcaactacttgtctggcagcaagtccatttctatggctggctgtgccacacaaattttcttctatatatcattgcttggctccgaatgctttctgttggctgttatgtcttatgaccgctacactgccatttgccaccctctaagatacaccaatctcatgagacccaaaatttgtggacttatgactgccttctcctggatcctgggctctacagatggaatcattgatgctgtagcgacattttccttctcctactgtgggtctcgggaaatagcccacttctgctgtgacttcccttccctactaatcctctcatgcaatgacacatcaatatttgaagaggttattttcatctgctgtatagtaatgcttgttttccctgttgcaatcatcatcacttcctatgctcgagttattctggctgtcattcacatgggatctggagagggacgtcgcaaagcttttactacttgttcctctcacctcatggtggtgggaatgtactatggagcaggtttgttcatgtgcattcagcccacatctcatcattctcctatgcaggacaagatggtgtctgtattctacaccatcgtcactcccatgctgaatcctctcatttatagcctcaggaacaaagaagttaaaaaggccataaagaggttgttcaagagaaagtgctgcaggagaaggtgagcggccgc

SEQ ID NO: 420 - DNA, 1112 bp, synthetic construct
  source 1..1112: mol_type = other DNA; note = mmLucy-FLAG-rho-OR2M7(F35L,V78A,D191N)
ggatccgccaccatgagccaccagatcctgctgctcctggccctgctgaccctaggcctggctgattacaaggacgacgacgataagatcgaattgatgaacgggaccgagggcccaaacttctacgtgcctttctccaacaagacgggcgtggtggaattcatggcatgggagaatcagaccttcaactctgacttcctcctcctgggaatcttcaatcatagccccacccacaccttcctcttctttctggtcctggccatcctttcagtggccttcatgggaaactccatcatggttctcctcatctacctggatacccagctccacacccccatgtacttcctcctcagccaactgtccctcatggacctcatgctcatctgcaccactgcacccaagatggccttcaactacttgtctggcagcaagtccatttctatggctggctgtgccacacaaattttcttctatatatcattgcttggctccgaatgctttctgttggctgttatgtcttatgaccgctacactgccatttgccaccctctaagatacaccaatctcatgagacccaaaatttgtggacttatgactgccttctcctggatcctgggctctacagatggaatcattgatgctgtagcgacattttccttctcctactgtgggtctcgggaaatagcccacttctgctgtgacttcccttccctactaatcctctcatgcaataacacatcaatatttgaagaggttattttcatctgctgtatagtaatgcttgttttccctgttgcaatcatcatcacttcctatgctcgagttattctggctgtcattcacatgggatctggagagggacgtcgcaaagcttttactacttgttcctctcacctcatggtggtgggaatgtactatggagcaggtttgttcatgtgcattcagcccacatctcatcattctcctatgcaggacaagatggtgtctgtattctacaccatcgtcactcccatgctgaatcctctcatttatagcctcaggaacaaagaagttaaaaaggccataaagaggttgttcaagagaaagtgctgcaggagaaggtgagcggccgc

SEQ ID NO: 421 - DNA, 1133 bp, synthetic construct
  source 1..1133: mol_type = other DNA; note = mmLucy-FLAG-rho-OR2S2
ggatccgccaccatgagccaccagatcctgctgctcctggccctgctgaccctaggcctggctgattacaaggacgacgacgataagatcgaattgatgaacgggaccgagggcccaaacttctacgtgcctttctccaacaagacgggcgtggtggaattcatggaaaaagccaatgagacctcccctgtgatggggttcgttctcctgaggctctctgcccacccagagctggaaaagacattcttcgtgctcatcctgctgatgtacctcgtgatcctgctgggcaatggggtcctcatcctggtgaccatccttgactcccgcctgcacacgcccatgtacttcttcctagggaacctctccttcctggacatctgcttcactacctcctcagtcccactggtcctggacagctttttgactccccaggaaaccatctccttctcagcctgtgctgtgcagatggcactctcctttgccatggcaggaacagagtgcttgctcctgagcatgatggcatttgatcgctatgtggccatctgcaacccccttaggtactccgtgatcatgagcaaggctgcctacatgcccatggctgccagctcctgggctattggtggtgctgcttccgtggtacacacatccttggcaattcagctgcccttctgtggagacaatgtcatcaaccacttcacctgtgagattctggctgttctaaagttggcctgtgctgacatttccatcaatgtgatcagcatggaggtgacgaatgtgatcttcctaggagtcccggttctgttcatctctttctcctatgtcttcatcatcaccaccatcctgaggatcccctcagctgaggggaggaaaaaggtcttctccacctgctctgcccacctcaccgtggtgatcgtcttctacgggaccttattcttcatgtatgggaagcctaagtctaaggactccatgggagcagacaaagaggatctttcagacaaactcatcccccttttctatggggtggtgaccccgatgctcaaccccatcatctatagcctgaggaacaaagaagttaaaaaggccataaagaggttgttcaagagaaagtgctgcaggagaaggtgagcggccgc

SEQ ID NO: 422 - DNA, 1133 bp, synthetic construct
  source 1..1133: mol_type = other DNA; note = mmLucy-FLAG-rho-OR2S2(R17G,M143V)
ggatccgccaccatgagccaccagatcctgctgctcctggccctgctgaccctaggcctggctgattacaaggacgacgacgataagatcgaattgatgaacgggaccgagggcccaaacttctacgtgcctttctccaacaagacgggcgtggtggaattcatggaaaaagccaatgagacctcccctgtgatggggttcgttctcctggggctctctgcccacccagagctggaaaagacattcttcgtgctcatcctgctgatgtacctcgtgatcctgctgggcaatggggtcctcatcctggtgaccatccttgactcccgcctgcacacgcccatgtacttcttcctagggaacctctccttcctggacatctgcttcactacctcctcagtcccactggtcctggacagctttttgactccccaggaaaccatctccttctcagcctgtgctgtgcagatggcactctcctttgccatggcaggaacagagtgcttgctcctgagcatgatggcatttgatcgctatgtggccatctgcaacccccttaggtactccgtgatcatgagcaaggctgcctacgtgcccatggctgccagctcctgggctattggtggtgctgcttccgtggtacacacatccttggcaattcagctgcccttctgtggagacaatgtcatcaaccacttcacctgtgagattctggctgttctaaagttggcctgtgctgacatttccatcaatgtgatcagcatggaggtgacgaatgtgatcttcctaggagtcccggttctgttcatctctttctcctatgtcttcatcatcaccaccatcctgaggatcccctcagctgaggggaggaaaaaggtcttctccacctgctctgcccacctcaccgtggtgatcgtcttctacgggaccttattcttcatgtatgggaagcctaagtctaaggactccatgggagcagacaaagaggatctttcagacaaactcatcccccttttctatggggtggtgaccccgatgctcaaccccatcatctatagcctgaggaacaaagaagttaaaaaggccataaagaggttgttcaagagaaagtgctgcaggagaaggtgagcggccgc

SEQ ID NO: 423 - DNA, 1109 bp, synthetic construct
  source 1..1109: mol_type = other DNA; note = mmLucy-FLAG-rho-OR2T1
ggatccgccaccatgagccaccagatcctgctgctcctggccctgctgaccctaggcctggctgattacaaggacgacgacgataagatcgaattgatgaacgggaccgagggcccaaacttctacgtgcctttctccaacaagacgggcgtggtggaattcatggaagagtacaacacatcctctacagacttcactttcatggggctgttcaacagaaaggaaacctcaggtcttatttttgccatcatctctatcatcttcttcaccgcactgatggccaatggggttatgatcttcctgatccaaacagatttgcgccttcatacacccatgtacttcctcctcagccacctttccttaattgacatgatgtatatttccactattgtgcctaagatgctggttaattacctgctggatcaaaggaccatttcctttgtggggtgcacagctcaacacttcctctaccttacccttgtgggagctgaattcttcctgctgggcctcatggcctatgaccgctatgtggccatttgcaaccctctgagataccctgtcctcatgagccgccgggtctgttggatgattatagcaggttcctggtttgggggctctttggatggcttcctcctaacccccatcaccatgagctttcccttctgcaattcccgggagattaaccacttcttctgtgaggcaccagcagtcctgaagttggcatgtgcagacacagccctctacgagacagtgatgtatgtgtgctgtgttttgatgctgctgattcctttctctgtagtccttgcttcctatgcccgaatcctgactacagttcagtgcatgagctcagtggagggcaggaagaaggcatttgccacttgctcatcccacatgactgtggtgtccttgttctacggggctgccatgtacacctacatgctgccacattcttaccacaagccagcccaggacaaagtcctctctgtgttttacaccattctcacacccatgctgaaccccctcatctacagccttaggaacaaagaagttaaaaaggccataaagaggttgttcaagagaaagtgctgcaggagaaggtgagcggccgc

SEQ ID NO: 424 - DNA, 1112 bp, synthetic construct
  source 1..1112: mol_type = other DNA; note = mmLucy-FLAG-rho-OR2T10
ggatccgccaccatgagccaccagatcctgctgctcctggccctgctgaccctaggcctggctgattacaaggacgacgacgataagatcgaattgatgaacgggaccgagggcccaaacttctacgtgcctttctccaacaagacgggcgtggtggaattcatgcggctggccaaccagaccctgggtggtgactttttcctgttgggaatcttcagccagatctcacaccctggccgcctctgcttgcttatcttcagtatatttttgatggctgtgtcttggaatattacattgatacttctgatccacattgactcctctctgcatactcccatgtacttctttataaaccagctctcactcatagacttgacatatatttctgtcactgtccccaaaatgctggtgaaccagctggccaaagacaagaccatctcggtccttgggtgtggcacccagatgtacttctacctgcagttgggaggtgcagagtgctgccttctagccgccatggcctatgaccgctatgtggctatctgccatcctctccgttactctgtgctcatgagccatagggtatgtctcctcctggcatcaggctgctggtttgtgggctcagtggatggcttcatgctcactcccatcgccatgagcttccccttctgcagatcccatgagattcagcacttcttctgtgaggtccctgctgttttgaagctctcttgctcagacacctcactttacaagattttcatgtacttgtgctgtgtcatcatgctcctgatacctgtgacggtcatttcagtgtcttactactatatcatcctcaccatccataagatgaactcagttgagggtcggaaaaaggccttcaccacctgctcctcccacattacagtggtcagcctcttctatggagctgctatttacaactacatgctccccagctcctaccaaactcctgagaaagatatgatgtcatcctttttctacactatccttacacctgtcttgaatcctatcatttacagtttcaggaacaaagaagttaaaaaggccataaagaggttgttcaagagaaagtgctgcaggagaaggtgagcggccgc

SEQ ID NO: 425 - DNA, 1103 bp, synthetic construct
  source 1..1103: mol_type = other DNA; note = mmLucy-FLAG-rho-OR2T11
ggatccgccaccatgagccaccagatcctgctgctcctggccctgctgaccctaggcctggctgattacaaggacgacgacgataagatcgaattgatgaacgggaccgagggcccaaacttctacgtgcctttctccaacaagacgggcgtggtggaattcatgacgaacacatcatcctctgacttcaccctcctggggcttctggtgaacagtgaggctgccgggattgtatttacagtgatccttgctgttttcttgggggccgtgactgcaaatttggtcatgatattcttgattcaggtggactctcgcctccacacccccatgtactttctgctcagtcagctgtccatcatggacacccttttcatctgtaccactgtcccaaaactcctggcagacatggtttctaaagagaagatcatttcctttgtggcctgtggcatccagatcttcctctacctgaccatgattggttctgagttcttcctcctgggcctcatggcctatgaccgctacgtggctgtctgtaaccctctgagatacccagtcctgatgaaccgcaagaagtgtcttttgctggctgctggtgcctggtttgggggctccctcgatggctttctgctcactcccatcaccatgaatgtcccttactgtggctcccgaagtatcaaccattttttctgtgagatcccagcagttctgaaactggcctgtgcagacacgtccttgtatgaaactctgatgtacatctgctgtgtcctcatgttgctcatccccatctctatcatctccacttcctactccctcatcttgttaaccatccaccgcatgccctctgctgaaggtcgcaaaaaggccttcaccacttgttcctcccacttgactgtagttagcatcttctatggggctgccttctacacatacgtgctgccccagtccttccacacccccgagcaggacaaagtagtgtcagccttctataccattgtcacgcccatgcttaatcctctcatctacagcctcaggaacaaagaagttaaaaaggccataaagaggttgttcaagagaaagtgctgcaggagaaggtgagcggccgc

SEQ ID NO: 426 - DNA, 1106 bp, synthetic construct
  source 1..1106: mol_type = other DNA; note = mmLucy-FLAG-rho-OR2T12
ggatccgccaccatgagccaccagatcctgctgctcctggccctgctgaccctaggcctggctgattacaaggacgacgacgataagatcgaattgatgaacgggaccgagggcccaaacttctacgtgcctttctccaacaagacgggcgtggtggaattcatggagatgagaaatactaccccagattttattctcctaggactctttaaccacaccagagcccaccaagtcctcttcatgatgcttctggccaccgttttgacctccctgtttagcaatgccctcatgattctcctgattcactgggaccaccggctccacaggcccatgtacttcctcctgagccaactttccctcatggacatgatgctggtttccaccactgtgcccaaaatggcggctgactacttgaccggaaataaggccatctcccgcgctggctgtggtgtgcagatcttcttcctccccacactgggtggtggagagtgcttcctcttagcagccatggcctatgaccgctatgcggctgtctgccacccactccgatatcccactctcatgagctggcagctgtgcctgaggatgaccatgtcgtcctggctcctgggtgcagctgacggcctcctgcaggctgttgctaccctgagcttcccatattgcggtgcacacgagatcgatcacttcttctgcgaggcccccgtgttggtgcgtttggcttgtgctgacacttcagtcttcgaaaacgccatgtacatctgctgtgtgttaatgctcctggtccccttttccctcatcctgtcctcctatggtctcatcctcgctgctgttctgctcatgcgctctacagaagcccgcaagaaggcctttgccacctgctcttcacatgtggctgtggtgggactcttttatggagctggcatttttacctatatgagacccaaatcccacaggtccactaaccacgataaggttgtgtcagccttctatactatgttcacccctttactaaatcccctcatctacagtgtgaggaacaaagaagttaaaaaggccataaagaggttgttcaagagaaagtgctgcaggagaaggtgagcggccgc

SEQ ID NO: 427 - DNA, 1106 bp, synthetic construct
  source 1..1106: mol_type = other DNA; note = mmLucy-FLAG-rho-OR2T12(R55T)
ggatccgccaccatgagccaccagatcctgctgctcctggccctgctgaccctaggcctggctgattacaaggacgacgacgataagatcgaattgatgaacgggaccgagggcccaaacttctacgtgcctttctccaacaagacgggcgtggtggaattcatggagatgagaaatactaccccagattttattctcctaggactctttaaccacaccagagcccaccaagtcctcttcatgatgcttctggccaccgttttgacctccctgtttagcaatgccctcatgattctcctgattcactgggaccaccggctccacacgcccatgtacttcctcctgagccaactttccctcatggacatgatgctggtttccaccactgtgcccaaaatggcggctgactacttgaccggaaataaggccatctcccgcgctggctgtggtgtgcagatcttcttcctccccacactgggtggtggagagtgcttcctcttagcagccatggcctatgaccgctatgcggctgtctgccacccactccgatatcccactctcatgagctggcagctgtgcctgaggatgaccatgtcgtcctggctcctgggtgcagctgacggcctcctgcaggctgttgctaccctgagcttcccatattgcggtgcacacgagatcgatcacttcttctgcgaggcccccgtgttggtgcgtttggcttgtgctgacacttcagtcttcgaaaacgccatgtacatctgctgtgtgttaatgctcctggtccccttttccctcatcctgtcctcctatggtctcatcctcgctgctgttctgctcatgcgctctacagaagcccgcaagaaggcctttgccacctgctcttcacatgtggctgtggtgggactcttttatggagctggcatttttacctatatgagacccaaatcccacaggtccactaaccacgataaggttgtgtcagccttctatactatgttcacccctttactaaatcccctcatctacagtgtgaggaacaaagaagttaaaaaggccataaagaggttgttcaagagaaagtgctgcaggagaaggtgagcggccgc

SEQ ID NO: 428 - DNA, 1115 bp, synthetic construct
  source 1..1115: mol_type = other DNA; note = mmLucy-FLAG-rho-OR2T2
ggatccgccaccatgagccaccagatcctgctgctcctggccctgctgaccctaggcctggctgattacaaggacgacgacgataagatcgaattgatgaacgggaccgagggcccaaacttctacgtgcctttctccaacaagacgggcgtggtggaattcatgggcatggagggtcttctccagaactccactaacttcgtcctcacaggcctcatcacccatcctgccttccccgggcttctctttgcaatagtcttctccatctttgtggtggctataacagccaacttggtcatgattctgctcatccacatggactcccgcctccacacacccatgtacttcttgctcagccagctctccatcatggataccatctacatctgtatcactgtccccaagatgctccaggacctcctgtccaaggacaagaccatttccttcctgggctgtgcagttcagatcttcctctacctgaccctgattggaggggaattcttcctgctgggtctcatggcctatgaccgctatgtggctgtgtgcaaccctctacggtaccctctcctcatgaaccgcagggtttgcttattcatggtggtcggctcctgggttggtggttccttggatgggttcatgctgactcctgtcactatgagtttccccttctgtagatcccgagagatcaatcactttttctgtgagatcccagccgtgctgaagttgtcttgcacagacacgtcactctatgagaccctgatgtatgcctgctgcgtgctgatgctgcttatccctctatctgtcatctctgtctcctacacgcacatcctcctgactgtccacaggatgaactctgctgagggccggcgcaaagcctttgctacgtgttcctcccacattatggtggtgagcgttttctacggggcagccttctacaccaacgtgctgccccactcctaccacactccagagaaagataaagtggtgtctgccttctacaccatcctcacccccatgctcaacccactcatctacagcttgaggaacaaagaagttaaaaaggccataaagaggttgttcaagagaaagtgctgcaggagaaggtgagcggccgc

SEQ ID NO: 429 - DNA, 1112 bp, synthetic construct
  source 1..1112: mol_type = other DNA; note = mmLucy-FLAG-rho-OR2T27(L36V)
ggatccgccaccatgagccaccagatcctgctgctcctggccctgctgaccctaggcctggctgattacaaggacgacgacgataagatcgaattgatgaacgggaccgagggcccaaacttctacgtgcctttctccaacaagacgggcgtggtggaattcatggagcagagcaattattccgtgtatgccgactttatccttctgggtttgttcagcaacgcccgtttcccctggcttctctttgccctcattctcctggtctttgtgacctccatagccagcaacgtggtcaagatcattctcatccacatagactcccgcctccacacccccatgtacttcctgctcagccagctctccctcagggacatcctgtatatttccaccattgtgcccaaaatgctggtcgaccaggtgatgagccagagagccatttcctttgctggatgcactgcccaacacttcctctacttgaccttagcaggggctgagttcttcctcctaggactcatgtcctatgatcgctacgtagccatctgcaaccctctgcactatcctgtcctcatgagccgcaagatctgctggttgattgtggcggcagcctggctgggagggtctatcgatggtttcttgctcacccccgtcaccatgcagttccccttctgtgcctctcgggagatcaaccacttcttctgcgaggtgcctgcccttctgaagctctcctgcacggacacatcagcctacgagacagccatgtatgtctgctgtattatgatgctcctcatccctttctctgtcatctcgggctcttacacaagaattctcattactgtttataggatgagcgaggcagaggggaggggaaaggctgtggccacctgctcctcacacatggtggttgtcagcctcttctatggggctgccatgtacacatacgtgctgcctcattcttaccacacccctgagcaggacaaagctgtatctgccttctacaccatccttactcccatgctcaatccactcatttacagccttaggaacaaagaagttaaaaaggccataaagaggttgttcaagagaaagtgctgcaggagaaggtgagcggccgc

SEQ ID NO: 430 - DNA, 1106 bp, synthetic construct
  source 1..1106: mol_type = other DNA; note = mmLucy-FLAG-rho-OR2T29
ggatccgccaccatgagccaccagatcctgctgctcctggccctgctgaccctaggcctggctgattacaaggacgacgacgataagatcgaattgatgaacgggaccgagggcccaaacttctacgtgcctttctccaacaagacgggcgtggtggaattcatggccaaccacactggaaggttggatttcatcctcatgggactcttcagacaatccaaacatccagctctacttagtgtggtcatctttgtggttttcctgaaggcgttgtctggaaatgctgtcctgatccttctgatacactgtgacgcccacctccacagccccatgtactttttcatcagtcaattgtctctcatggacatggcgtacatttctgtcactgtgcccaagatgctcctggaccaggtcatgggtgtgaataaggtctcagcccctgagtgtgggatgcagatgttcctctatctgacactagcaggttcggaatttttccttctagccaccatggcctatgaccgctacgtggccatctgccatcctctccgttaccctgtcctcatgaaccatagggtctgtcttttcctggcatcgggctgctggttcctgggctcagtggatggcttcatgctcactcccatcaccatgagcttccccttctgcagatcctgggagattcatcatttcttctgtgaagtccctgctgtaacgatcctgtcctgctcagacacctcactctatgagaccctcatgtacctatgctgtgtcctcatgctcctcatccctgtgacgatcatttcaagctcctatttactcatcctcctcaccgtccacaggatgaactcagcagagggccggaaaaaggcctttgccacctgctcctcccacctgactgtggtcatcctcttctatggggctgccgtctacacctacatgctccccagctcctaccacacccctgagaaggacatgatggtatctgtcttctataccatcctcactccggtgctgaaccctttaatctatagtcttaggaacaaagaagttaaaaaggccataaagaggttgttcaagagaaagtgctgcaggagaaggtgagcggccgc

SEQ ID NO: 431 - DNA, 1127 bp, synthetic construct
  source 1..1127: mol_type = other DNA; note = mmLucy-FLAG-rho-OR2T3
ggatccgccaccatgagccaccagatcctgctgctcctggccctgctgaccctaggcctggctgattacaaggacgacgacgataagatcgaattgatgaacgggaccgagggcccaaacttctacgtgcctttctccaacaagacgggcgtggtggaattcatgtgctcagggaatcagacttctcagaatcaaacagcaagcactgatttcaccctcacgggactctttgctgagagcaagcatgctgccctcctctacaccgtgaccttccttcttttcttgatggccctcactgggaatgccctcctcatcctcctcatccactcagagccccgcctccacacccccatgtacttcttcatcagccagctcgcgctcatggatctcatgtacctatgcgtgactgtgcccaagatgcttgtgggccaggtcactggagatgataccatttccccgtcaggctgtgggatccagatgttcttctacctgaccctggctggagctgaggttttcctcctggctgccatggcctatgaccgatatgctgctgtttgcagacctctccattacccactgctgatgaaccagagggtgtgccagctcctggtgtcagcctgctgggttttgggaatggttgatggtttgttgctcacccccattaccatgagcttccccttttgccagtctaggaaaatcctgagttttttctgtgagactcctgccctgctgaagctctcctgctctgacgtctccctctataagacgctcatgtacctgtgctgcatcctcatgcttctcgcccccatcatggtcatctccagctcatacaccctcatcctgcatctcatccacaggatgaattctgccgccggccacaggaaggccttggccacctgctcctcccacatgatcatagtgctgctgctcttcggtgcttccttctacacctacatgctcccgagttcctaccacacagctgagcaggacatgatggtgtctgccttttacaccatcttcactcctgtgctgaaccccctcatttacagtctcaggaacaaagaagttaaaaaggccataaagaggttgttcaagagaaagtgctgcaggagaaggtgagcggccgc

SEQ ID NO: 432 - DNA, 1106 bp, synthetic construct
  source 1..1106: mol_type = other DNA; note = mmLucy-FLAG-rho-OR2T33(A169V)
ggatccgccaccatgagccaccagatcctgctgctcctggccctgctgaccctaggcctggctgattacaaggacgacgacgataagatcgaattgatgaacgggaccgagggcccaaacttctacgtgcctttctccaacaagacgggcgtggtggaattcatggagatgagaaatactaccccagattttattctcctaggactctttaaccacaccagagcccaccaagtcctcttcatgatggttctgagtatcgttttgacctccctgtttggcaattccctcatgattctcctgattcactgggaccaccggctccacacgcccatgtacttcctcctgagccaactttccctcatggacatgatgctggtttccaccactgtgcccaaaatggcggctgactacttgaccggaagtaaggccatctcccgcgctggctgtggtgtgcagatcttcttcctccccacactgggtggtggagagtgcttcctcttagcagccatggcctatgaccgctatgcggctgtctgccacccactccgatatcccactctcatgagctggcagctgtgcctgaggatgaccatgtcgtgttggctcctgggtgcagctgacgggctcctgcaggctgttgttaccctgagcttcccatattgtggtgtacacgagatcgatcacttcttctgcgagacccccgtgctggtgcgtttggcttgtgctgacacttcagtcttcgaaaacgccatgtacatctgctgtgtgttaatgctcctggtccccttttccctcatcctgtcctcctatggtctcatcctcgctgctgttctgcacatgcgctctacagaagcccgcaagaaggcctttgccacctgctcttcacatgtggctgtggtgggactcttttatggagctgccatttttacctatatgagacccaaatcccataggtccactaaccatgacaaggttgtgtcagccttctatactatgttcacccctttactaaaccccctcatctacagtgtgaggaacaaagaagttaaaaaggccataaagaggttgttcaagagaaagtgctgcaggagaaggtgagcggccgc

SEQ ID NO: 433 - DNA, 1127 bp, synthetic construct
  source 1..1127: mol_type = other DNA; note = mmLucy-FLAG-rho-OR2T34
ggatccgccaccatgagccaccagatcctgctgctcctggccctgctgaccctaggcctggctgattacaaggacgacgacgataagatcgaattgatgaacgggaccgagggcccaaacttctacgtgcctttctccaacaagacgggcgtggtggaattcatgtgctcagggaatcagacttctcagaatcaaacagcaagcactgatttcaccctcacgggactctttgctgagagcaagcatgctgccctcctctacaccgtgaccttccttcttttcttgatggccctcactgggaatgccctcctcatcctcctcatccactcagagccccgcctccacacccccatgtacttcttcatcagccagctcgcgctcatggatctcatgtacctatgcgtgactgtgcccaagatgcttgtgggccaggtcactggagatgataccatttccccgtcaggctgtgggatccagatgttcttccacctgaccctggctggagctgaggttttcctcctggctgccatggcctatgaccgatatgctgctgtttgcagacctctccattacccactgctgatgaaccagagggtgtgccagctcctggtgtcagcctgctgggttttgggaatggttgatggtttgttgctcacccccattaccatgagcttccccttttgccagtctaggaaaatcctgagttttttctgtgagactcctgccctgctgaagctctcctgctctgacgtctccctctataagatgctcacgtacctgtgctgcatcctcatgcttctcacccccatcatggtcatctccagctcatacaccctcatcctgcatctcatccacaggatgaattctgccgccggccgcaggaaggccttggccacctgctcctcccacatgatcatagtgctgctgctcttcggtgcttccttctacacctacatgctccggagttcctaccacacagctgagcaggacatgatggtgtctgccttttacaccatcttcactcctgtgctgaaccccctcatttacagtctcaggaacaaagaagttaaaaaggccataaagaggttgttcaagagaaagtgctgcaggagaaggtgagcggccgc

SEQ ID NO: 434 - DNA, 1112 bp, synthetic construct
  source 1..1112: mol_type = other DNA; note = mmLucy-FLAG-rho-OR2T35
ggatccgccaccatgagccaccagatcctgctgctcctggccctgctgaccctaggcctggctgattacaaggacgacgacgataagatcgaattgatgaacgggaccgagggcccaaacttctacgtgcctttctccaacaagacgggcgtggtggaattcatgggcatggagggtcttctccagaactccactaacttcgtcctcacaggcctcatcacccatcctgccttccccgggcttctctttgcagtagtcttctccatctttgtggtggctataacagccaacttggtcatgattctgctcatccacatggactcccgcctccacacacccatgtacttcttgctcagccagctctccatcatggataccatctacatctgtatcactgtccccaagatgctccaggacctcctgtccaaggacaagaccatttccttcctgggctgtgcagttcaaatcttctacctgaccctgattggaggggaattcttcctgctgggtctcatggcctatgaccgctatgtggctgtgtgcaaccctctacggtaccctctcctcatgaaccgcagggtttgcttattcatggtggtcggctcctgggttggtggttccttggatgggttcatgctgactcctgtcactatgagtttccccttctgtagatcccgagagatcaatcactttttctgtgagatcccagccgtgctgaagttgtcttgcacagacacgtcactctatgagaccctgatgtatgcctgctgcgtgctgatgctgcttatccctctatctgtcatctctgtgtcctacacgcacatcctcctgactgtccacaggatgaactctgctgagggccggcgcaaagcctttgctacgtgttcctcccacattatggtggtgagcgttttctacggggcagccttctacaccaacgtgctgccccactcctaccacactccagagaaagataaagtggtgtctgccttctacaccatcctcacccccatgctcaacccactcatctacagcttgaggaacaaagaagttaaaaaggccataaagaggttgttcaagagaaagtgctgcaggagaaggtgagcggccgc

SEQ ID NO: 435 - DNA, 1106 bp, synthetic construct
  source 1..1106: mol_type = other DNA; note = mmLucy-FLAG-rho-OR2T4
ggatccgccaccatgagccaccagatcctgctgctcctggccctgctgaccctaggcctggctgattacaaggacgacgacgataagatcgaattgatgaacgggaccgagggcccaaacttctacgtgcctttctccaacaagacgggcgtggtggaattcatggccaaccacactggatggtcggatttcatcctgttgggactcttcagacaatccaaacatccagcactactttgtgtggtcatttttgtggttttcctgatggcgttgtctggaaatgctgtcctgatccttctgatacactgtgacgcccacctccacacccccatgtactttttcatcagtcaattgtctctcatggacatggcgtacatttctgtcactgtgcccaagatgctcctggaccaggtcatgggtgtgaataagatctcagcccctgagtgtgggatgcagatgttcttctacgtgacactagcaggttcagaatttttccttctagccaccatggcctatgaccgctacgtggccatctgccatcctctccgttaccctgtcctcatgaaccatagggtgtgtctcttcctgtcatcaggctgctggttcctgggctcagtggatggcttcacattcactcccatcaccatgaccttccccttccgtggatcccgggagattcatcatttcttctgtgaagttcctgctgtattgaatctctcctgctcagacacctcactctatgagattttcatgtacttgtgctgtgtcctcatgctcctcatccctgtggtgatcatttcaagctcctatttactcatcctcctcaccatccacgggatgaactcagcagagggccggaaaaaggcctttgccacctgctcctcccacctgactgtggtcatcctcttctatggggctgccatctacacctacatgctccccagctcctaccacacccctgagaaggacatgatggtatctgtcttctataccatcctcactccagtggtgaaccctttaatctatagtcttaggaacaaagaagttaaaaaggccataaagaggttgttcaagagaaagtgctgcaggagaaggtgagcggccgc

SEQ ID NO: 436 - DNA, 1106 bp, synthetic construct
  source 1..1106: mol_type = other DNA; note = mmLucy-FLAG-rho-OR2T5
ggatccgccaccatgagccaccagatcctgctgctcctggccctgctgaccctaggcctggctgattacaaggacgacgacgataagatcgaattgatgaacgggaccgagggcccaaacttctacgtgcctttctccaacaagacgggcgtggtggaattcatggccaaccacactggaaagttggatttcatcctcatgggactcttcagacgatccaaacatccagctctacttagtgtggtcatctttgtggttttcctgaaggcgttgtctggaaatgctgtcctgatccttctgatacactgtgacgcccacctccacagccccatgtactttttcatcagtcaattgtctctcatggacatggcgtacatttctgtcactgtgcccaagatgctcctggaccaggtcatgggtgtgaataaggtctcagcccctgagtgtgggatgcagatgttcctctatctgacactagcaggttcggaatttttccttctagccaccatggcctatgaccgctacgtggccatctgccatcctctccgttaccctgtcctcatgaaccatagggtctgtcttttcctggcatcgggctgctggttcctgggctcagtggatggcttcatgctcactcccatcaccatgagcttccccttctgcagatcctgggagattcatcatttcttctgtgaagtccctgctgtaacgatcctgtcctgctcagacacctcactctatgagaccctcatgtacctatgctgtgtcctcatgctcctcatccctgtgacgatcatttcaagctcctatttactcatcctcctcaccgtccacaggatgaactcagcagagggccggaaaaaggcctttgccacctgctcctcccacctgactgtggtcatcctcttctatggggctgccgtctacacctacatgctccccagctcctaccacacccctgagaaggacatgatggtatctgtcttctataccatcctcactccggtgctgaaccctttaatctatagtcttaggaacaaagaagttaaaaaggccataaagaggttgttcaagagaaagtgctgcaggagaaggtgagcggccgc

SEQ ID NO: 437 - DNA, 1112 bp, synthetic construct
  source 1..1112: mol_type = other DNA; note = mmLucy-FLAG-rho-OR2T6
ggatccgccaccatgagccaccagatcctgctgctcctggccctgctgaccctaggcctggctgattacaaggacgacgacgataagatcgaattgatgaacgggaccgagggcccaaacttctacgtgcctttctccaacaagacgggcgtggtggaattcatgaatgaaaacaatgaaaccttgaccagaggctttaccctcatggggctcttcactcacaataaatgctcaggattctttttcggtgtcatttgtgccgtcttcttcatggccatgatagctaatggggtcatgatcttcctgattaacatagaccctcatctccacacccccatgtacttcctcctcagccacctctccgtcattgacacattatacatctccaccattgtgcccaagatgctggtagattatctcatgggcgaggggaccatctctttcatcgcctgcactgctcagtgctttctctacatgggctttatgggggctgaattcttcctgctggggctcatggcctatgaccgctacgtggccatctgcaacccactgcgctatcctgtcctcatcagctggcgggtctgctggatgatcctggccagctcttggttcggtggggctttggacagttttctcctcacccccattaccatgagtctcccgttctgtgcctctcaccaaatcaatcactttttctgtgaggcacccaccatgctgaggctggcctgtggggacaaaaccacctatgaaacagtgatgtatgtgtgctgcgttgcaatgctgctgatccccttctcggtggtgactgcatcctacaccaggattctcatcacagtgcatcagatgacatcggctgaagggaggaagaaggcctttgccacctgctcttcacacatgatggtggtgacattgttctatggggctgccttgtatacgtatacgcttccccaatcttaccacaccccaatcaaagataaggtcttctctgccttttataccatcctcacacccttattaaaccctctcatctacagtctgaggaacaaagaagttaaaaaggccataaagaggttgttcaagagaaagtgctgcaggagaaggtgagcggccgc

SEQ ID NO: 438 - DNA, 1112 bp, synthetic construct
  source 1..1112: mol_type = other DNA; note = mmLucy-FLAG-rho-OR2T6(S243A)
ggatccgccaccatgagccaccagatcctgctgctcctggccctgctgaccctaggcctggctgattacaaggacgacgacgataagatcgaattgatgaacgggaccgagggcccaaacttctacgtgcctttctccaacaagacgggcgtggtggaattcatgaatgaaaacaatgaaaccttgaccagaggctttaccctcatggggctcttcactcacaataaatgctcaggattctttttcggtgtcatttgtgccgtcttcttcatggccatgatagctaatggggtcatgatcttcctgattaacatagaccctcatctccacacccccatgtacttcctcctcagccacctctccgtcattgacacattatacatctccaccattgtgcccaagatgctggtagattatctcatgggcgaggggaccatctctttcatcgcctgcactgctcagtgctttctctacatgggctttatgggggctgaattcttcctgctggggctcatggcctatgaccgctacgtggccatctgcaacccactgcgctatcctgtcctcatcagctggcgggtctgctggatgatcctggccagctcttggttcggtggggctttggacagttttctcctcacccccattaccatgagtctcccgttctgtgcctctcaccaaatcaatcactttttctgtgaggcacccaccatgctgaggctggcctgtggggacaaaaccacctatgaaacagtgatgtatgtgtgctgcgttgcaatgctgctgatccccttctcggtggtgactgcatcctacaccaggattctcatcacagtgcatcagatgacatcggctgaagggaggaagaaggcctttgccacctgctctgcacacatgatggtggtgacattgttctatggggctgccttgtatacgtatacgcttccccaatcttaccacaccccaatcaaagataaggtcttctctgccttttataccatcctcacacccttattaaaccctctcatctacagtctgaggaacaaagaagttaaaaaggccataaagaggttgttcaagagaaagtgctgcaggagaaggtgagcggccgc

SEQ ID NO: 439 - DNA, 1085 bp, synthetic construct
  source 1..1085: mol_type = other DNA; note = mmLucy-FLAG-rho-OR2T7
ggatccgccaccatgagccaccagatcctgctgctcctggccctgctgaccctaggcctggctgattacaaggacgacgacgataagatcgaattgatgaacgggaccgagggcccaaacttctacgtgcctttctccaacaagacgggcgtggtggaattcatgccgactttatccttctgggtttgttcagcaacgcccgtttcccctggcttctttgccctcattctcctggtctttgtgacctccatagccagcaacgtggtcaagatcattctcatccacatagactcccgcctccacacccccatgtacttcctgctcagccagctctccctcagggacatcctgtatatttccaccattgtgcccaaaatgctggtcgaccaggtgatgagccagagagccatttcctttgctggatgcactgcccaacacttcctctacttgaccttagcaggggctgagttcttcctcctaggactcatgtcctgtgatcgctacgtagccatctgcaaccctctgcactatcctgacctcatgagccgcaagatctgctggttgattgtggcggcagcctggctgggagggtctatcgatggtttcttgctcacccccgtcaccatgcagttccccttctgtgcctctcgggagatcaaccacttcttctgcgaggtgcctgcccttctgaagctctcctgcacggacacatcagcctacgagacagccatgtatgtctgctgtattatgatgctcctcatccctttctctgtgatctcgggctcttacacaagaattctcattactgtttataggatgagcgaggcagaggggaggcgaaaggctgtggccacctgctcctcacacatggtggttgtcagcctcttctatggggctgccatgtacacatacgtgctgcctcattcttaccacacccctgagcaggacaaagctgtatctgccttctacaccatcctcactcccatgctcaatccactcatttacagccttaggaacaaagaagttaaaaaggccataaagaggttgttcaagagaaagtgctgcaggagaaggtgagcggccgc

SEQ ID NO: 440 - DNA, 1106 bp, synthetic construct
  source 1..1106: mol_type = other DNA; note = mmLucy-FLAG-rho-OR2T8
ggatccgccaccatgagccaccagatcctgctgctcctggccctgctgaccctaggcctggctgattacaaggacgacgacgataagatcgaattgatgaacgggaccgagggcccaaacttctacgtgcctttctccaacaagacgggcgtggtggaattcatggaaaatgggagctatacctcttatttcattctcctaggactctttaaccacaccagagcccaccaagtcctcttcatgatggttctgagtatcgttttgacctccctgtttggcaattccctcatgattctcctgattcactgggaccaccggctccacacgcccatgtacttcctcctgagccaactttccctcatggacgtgatgctggtttccaccactgtgcccaaaatggcggctgactacttgaccggaagtaaggccatctcccgcgctggctgtggtgcgcagatcttcttcctccccacactgggtggtggagagtgcttcctcttagcagccatggcctatgaccgctatgcggctgtctgccacccactccgatatcccactctcatgagctggcagctgtgcctgaggatgaacctgtcgtgttggctcctgggtgcagctgacgggctcctgcaggctgttgctaccctgagcttcccatattgcggtgcacacgagatcgatcacttcttctgcgagacccccgtgctggtgcgtttggcttgtgctgacacttcagtcttcgaaaacgccatgtacatctgctgtgtgttaatgctcctggtccccttttccctcatcctgtcctcctatggtctcatcctcgctgctgttctgcacatgcgctctacagaagcccgcaagaaggcctttgccacctgctcttcacatgtggctgtggtgggactcttttatggagctgccatttttacctatatgagacccaaatcccacaggtccactaaccacgacaaggttgtgtcagccttctatactatgttcacccctttactaaaccccctcatctacagtgtgaggaacaaagaagttaaaaaggccataaagaggttgttcaagagaaagtgctgcaggagaaggtgagcggccgc

SEQ ID NO: 441 - DNA, 1115 bp, synthetic construct
  source 1..1115: mol_type = other DNA; note = mmLucy-FLAG-rho-OR2V1
ggatccgccaccatgagccaccagatcctgctgctcctggccctgctgaccctaggcctggctgattacaaggacgacgacgataagatcgaattgatgaacgggaccgagggcccaaacttctacgtgcctttctccaacaagacgggcgtggtggaattcatgggaagatgggtgaaccagtcctacacagatggcttcttcctcttgggcatcttttcccacagccagactgaccttgtcctcttctctgcagttatggtggtcttcacagtggccctctgtgggaatgtcctcctcatcttcctcatctacctggacgctggacttcacacccccatgtacttcttcctcagccagctctccctcatggacctcatgttggtctgtaacattgtgccaaagatggcagccaacttcctgtctggcaggaagtccatctcctttgtgggctgtggcatacaaattggcttttttgtctctcttgtgggatctgaggggctcttgctgggactcatggcttatgaccgctacgtggccgttagccacccacttcactatcccatcctcatgaatcagagggtctgtctccagattactgggagctcctgggcctttgggataatagatggagtgattcagatggtggcagccatgggcttaccttactgtggctcaaggagcgtggatcactttttctgtgaggtacaagctttattgaagctggcctgtgcagacacttccctttttgacaccctcctctttgcttgctgtgtcttcatgcttctccttcccttctccatcatcatggcctcctatgcttgcatcctaggggctgtgctccgaatacgctctgctcaggcctggaaaaaagccctggccacctgctcctcccacctaacagctgtcaccctcttctatggggcagccatgttcatgtacctgaggcctaggcgctaccgggcccctagccatgacaaggtggcctctatcttctacacagtccttactcccatgctgaaccccctcatttacagcttgaggaacaaagaagttaaaaaggccataaagaggttgttcaagagaaagtgctgcaggagaaggtgagcggccgc

SEQ ID NO: 442 - DNA, 1115 bp, synthetic construct
  source 1..1115: mol_type = other DNA; note = mmLucy-FLAG-rho-OR2V2(H221R)
ggatccgccaccatgagccaccagatcctgctgctcctggccctgctgaccctaggcctggctgattacaaggacgacgacgataagatcgaattgatgaacgggaccgagggcccaaacttctacgtgcctttctccaacaagacgggcgtggtggaattcatggagacgtgggtgaaccagtcctacacagatggcttcttcctcttaggcatcttctcccacagtactgctgaccttgtcctcttctccgtggttatggcggtcttcacagtggccctctgtgggaatgtcctcctcatcttcctcatctacatggaccctcaccttcacacccccatgtacttcttcctcagccagctctccctcatggacctcatgttggtctgtaccaatgtgccaaagatggcagccaacttcctgtctggcaggaagtccatctcctttgtgggctgtggcatacaaattggcctctttgtctgtcttgtgggatctgaggggctcttgctgggactcatggcttatgaccgctatgtggccattagccacccacttcactatcccatcctcatgaatcagagggtctgtctccagattactgggagctcctgggcctttgggataatcgatggcttgatccagatggtggtagtaatgaatttcccctactgtggcttgaggaaggtgaaccatttcttctgtgagatgctatccttgttgaagctggcctgtgtagacacatccctgtttgagaaggtgatatttgcttgctgtgtcttcatgcttctcttcccattctccatcatcgtggcctcctatgctcgcattctagggactgtgctgcaaatgcactctgctcaggcctggaaaaaggccctggccacctgctcctcccacctgacagctgtcaccctcttctatggggcagccatgttcatctacctgaggcctaggcactaccgggcccccagccatgacaaggtggcctctatcttctacacggtccttactcccatgctcaaccccctcatttacagcttgaggaacaaagaagttaaaaaggccataaagaggttgttcaagagaaagtgctgcaggagaaggtgagcggccgc

SEQ ID NO: 443 - DNA, 1115 bp, synthetic construct
  source 1..1115: mol_type = other DNA; note = mmLucy-FLAG-rho-OR2V2
ggatccgccaccatgagccaccagatcctgctgctcctggccctgctgaccctaggcctggctgattacaaggacgacgacgataagatcgaattgatgaacgggaccgagggcccaaacttctacgtgcctttctccaacaagacgggcgtggtggaattcatggagacgtgggtgaaccagtcctacacagatggcttcttcctcttaggcatcttctcccacagtactgctgaccttgtcctcttctccgtggttatggcggtcttcacagtggccctctgtgggaatgtcctcctcatcttcctcatctacatggaccctcaccttcacacccccatgtacttcttcctcagccagctctccctcatggacctcatgttggtctgtaccaatgtgccaaagatggcagccaacttcctgtctggcaggaagtccatctcctttgtgggctgtggcatacaaattggcctctttgtctgtcttgtgggatctgaggggctcttgctgggactcatggcttatgaccgctatgtggccattagccacccacttcactatcccatcctcatgaatcagagggtctgtctccagattactgggagctcctgggcctttgggataatcgatggcttgatccagatggtggtagtaatgaatttcccctactgtggcttgaggaaggtgaaccatttcttctgtgagatgctatccttgttgaagctggcctgtgtagacacatccctgtttgagaaggtgatatttgcttgctgtgtcttcatgcttctcttcccattctccatcatcgtggcctcctatgctcacattctagggactgtgctgcaaatgcactctgctcaggcctggaaaaaggccctggccacctgctcctcccacctgacagctgtcaccctcttctatggggcagccatgttcatctacctgaggcctaggcactaccgggcccccagccatgacaaggtggcctctatcttctacacggtccttactcccatgctcaaccccctcatttacagcttgaggaacaaagaagttaaaaaggccataaagaggttgttcaagagaaagtgctgcaggagaaggtgagcggccgc

SEQ ID NO: 444 - DNA, 1112 bp, synthetic construct
  source 1..1112: mol_type = other DNA; note = mmLucy-FLAG-rho-OR2W1
ggatccgccaccatgagccaccagatcctgctgctcctggccctgctgaccctaggcctggctgattacaaggacgacgacgataagatcgaattgatgaacgggaccgagggcccaaacttctacgtgcctttctccaacaagacgggcgtggtggaattcatggaccaaagcaattatagttctttacatggttttattctgcttggcttctctaaccatccaaaaatggagatgatcctgtcaggagttgtcgccatcttctacttaattacattggtgggtaacacagccatcattcttgcatctctcctggattcccagcttcatacaccaatgtactttttcctcagaaatttatctttcctagatctatgtttcacaaccagcatcatccctcagatgctggtcaacttgtggggacctgataagaccatcagctatgtgggttgtatcatccaactctatgtttacatgtggttgggctcagttgagtgccttctcctggctgttatgtcctatgatcgttttacagctatatgtaagcccttgcattattttgtagtcatgaacccacatctatgtctaaagatgattatcatgatctggagtattagtttggccaattctgtagtattatgtacactcactctgaatttgcccacatgtggaaacaacattctggatcatttcttgtgtgagttgccagctctggtcaagatagcttgtgtagacaccacaacagttgaaatgtctgttttcgctttaggcattataattgtcctcacacctctcatccttattcttatatcctatggctacattgccaaagctgtgctgagaacgaagtcaaaagcaagccagcgaaaagcaatgaatacctgtggatctcatcttactgtagtgtctatgttctatggaactattatctacatgtacctgcaaccaggtaacagggcttccaaagaccagggcaagttcctcaccctcttttacaccgtcatcactccaagtctcaacccgctcatttacaccttaaggaacaaagaagttaaaaaggccataaagaggttgttcaagagaaagtgctgcaggagaaggtgagcggccgc

SEQ ID NO: 445 - DNA, 1112 bp, synthetic construct
  source 1..1112: mol_type = other DNA; note = mmLucy-FLAG-rho-OR2W3(R179C,V190I,E196D,M272K,M275T)
ggatccgccaccatgagccaccagatcctgctgctcctggccctgctgaccctaggcctggctgattacaaggacgacgacgataagatcgaattgatgaacgggaccgagggcccaaacttctacgtgcctttctccaacaagacgggcgtggtggaattcatggatggaaccaatggcagcacccaaacccatttcatcctactgggattctctgaccgaccccatctggagaggatcctctttgtggtcatcctgatcgcgtacctcctgaccctcgtaggcaacaccaccatcatcctggtgtcccggctggacccccacctccacacccccatgtacttcttcctcgcccacctttccttcctggacctcagtttcaccaccagctccatcccccagctgctctacaaccttaatggatgtgacaagaccatcagctacatgggctgtgccatccagctcttcctgttcctgggtctgggtggtgtggagtgcctgcttctggctgtcatggcctatgaccggtgtgtggctatctgcaagcccctgcactacatggtgatcatgaaccccaggctctgccggggcttggtgtcagtgacctggggctgtggggtggccaactccttggccatgtctcctgtgaccctgcgcttaccccgctgtgggcaccacgaggtggaccacttcctgtgtgagatgcccgccctgatccggatggcctgcatcagcactgtggccatcgacggcaccgtctttgtcctggcggtgggtgttgtgctgtcccccttggtgtttatcctgctctcttacagctacattgtgagggctgtgttacaaattcggtcagcatcaggaaggcagaaggccttcggcacctgcggctcccatctcactgtggtctcccttttctatggaaacatcatctacatgtacatgcagccaggagccagttcttcccaggaccagggcaagttcctcacgctcttctacaacattgtcacccccctcctcaatcctctcatctacaccctcaggaacaaagaagttaaaaaggccataaagaggttgttcaagagaaagtgctgcaggagaaggtgagcggccgc

SEQ ID NO: 446 - DNA, 1112 bp, synthetic construct
  source 1..1112: mol_type = other DNA; note = mmLucy-FLAG-rho-OR2W3
ggatccgccaccatgagccaccagatcctgctgctcctggccctgctgaccctaggcctggctgattacaaggacgacgacgataagatcgaattgatgaacgggaccgagggcccaaacttctacgtgcctttctccaacaagacgggcgtggtggaattcatggatggaaccaatggcagcacccaaacccatttcatcctactgggattctctgaccgaccccatctggagaggatcctctttgtggtcatcctgatcgcgtacctcctgaccctcgtaggcaacaccaccatcatcctggtgtcccggctggacccccacctccacacccccatgtacttcttcctcgcccacctttccttcctggacctcagtttcaccaccagctccatcccccagctgctctacaaccttaatggatgtgacaagaccatcagctacatgggctgtgccatccagctcttcctgttcctgggtctgggtggtgtggagtgcctgcttctggctgtcatggcctatgaccggtgtgtggctatctgcaagcccctgcactacatggtgatcatgaaccccaggctctgccggggcttggtgtcagtgacctggggctgtggggtggccaactccttggccatgtctcctgtgaccctgcgcttaccccgctgtgggcaccacgaggtggaccacttcctgcgtgagatgcccgccctgatccggatggcctgcgtcagcactgtggccatcgaaggcaccgtctttgtcctggcggtgggtgttgtgctgtcccccttggtgtttatcctgctctcttacagctacattgtgagggctgtgttacaaattcggtcagcatcaggaaggcagaaggccttcggcacctgcggctcccatctcactgtggtctcccttttctatggaaacatcatctacatgtacatgcagccaggagccagttcttcccaggaccagggcatgttcctcatgctcttctacaacattgtcacccccctcctcaatcctctcatctacaccctcaggaacaaagaagttaaaaaggccataaagaggttgttcaagagaaagtgctgcaggagaaggtgagcggccgc

SEQ ID NO: 447 - DNA, 1112 bp, synthetic construct
  source 1..1112: mol_type = other DNA; note = mmLucy-FLAG-rho-OR2W5
ggatccgccaccatgagccaccagatcctgctgctcctggccctgctgaccctaggcctggctgattacaaggacgacgacgataagatcgaattgatgaacgggaccgagggcccaaacttctacgtgcctttctccaacaagacgggcgtggtggaattcatgggaaaggacaatgccagttacctacaggcattcatcctggtgggctcttctgatcggcctggactggagaaaattctctttgctgttatcttgatcttctgcatcctgaccctggtgggcaacactgccatcatcctcttgctggtcatggatgtcaggctccacacacccatgtacttctttcttgggaatctgtctttcttagatctctgctttacagcaagcattgcccctcagctgctgtggaacctggggggtccagagaagaccatcacctaccacggctgtgtggcccaactctacatctacatgatgctgggctccaccgagtgcgtcctcctggttgtcatgtcccatgaccgctatgtggccgtctgccggtccctgcactacatggcagtcatgcgcccacatctctgcctgcagctggtgactgtggcctggtgctgtggcttcctaaactccttcatcatgtgtcctcagacgatgcagctctcccggtgtggacgtcgcagggtggaccacttcctgtgtgagatgcctgctcttattgccatgtcttgtgaggaaaccatgctggtagaaggattcacctttgccctgggggtggctctcctcctggtgccgctctccctcatcctcatctcctatggcgtgattgcagccgcggtgctgaggatgaagtcagcagcagggcgaaagaaagccttccacacctgctcttctcacctcacagtggtctctctcttctacggaaccatcatctacgtgtacctgaagccggccaacagctactcccaagatcaggggaagttcctgactctcttctacaccatcgtcattcccagcatcaaccccctcatctacactttgaggaacaaagaagttaaaaaggccataaagaggttgttcaagagaaagtgctgcaggagaaggtgagcggccgc

SEQ ID NO: 448 - DNA, 1109 bp, synthetic construct
  source 1..1109: mol_type = other DNA; note = mmLucy-FLAG-rho-OR2Y1
ggatccgccaccatgagccaccagatcctgctgctcctggccctgctgaccctaggcctggctgattacaaggacgacgacgataagatcgaattgatgaacgggaccgagggcccaaacttctacgtgcctttctccaacaagacgggcgtggtggaattcatgggaagtttcaacaccagttttgaagatggcttcattttggtgggattctcagattggccgcaactggagcccatcctgtttgtctttatttttattttctactccctaactctctttggcaacaccatcatcatcgctctctcctggctagaccttcggctgcacacacctatgtacttctttctctctcatctgtccctcctggacctctgcttcaccaccagcaccgtgccccagctcctgatcaacctttgcggggtggaccgcaccatcacccgtggagggtgtgtggctcagctcttcatctacctagccctgggctccacagagtgtgtgctcctggtggtgatggcctttgaccgctatgctgctgtctgtcgtccactccactacatggccatcatgcacccccatctctgccagaccctggctatcgcctcctggggtgcgggtttcgtgaactctctgatccagacaggtctcgcaatggccatgcctctctgtggccatcgactgaatcacttcttctgtgagatgcctgtatttctgaagttggcttgtgcggacacagaaggaacagaggccaagatgtttgtggcccgagtcatagtcgtggctgttcctgcagcacttattctaggctcctatgtgcacattgctcatgcagtgctgagggtgaagtcaacggctgggcgcagaaaggcttttgggacttgtgggtcccacctcctagtagttttccttttttatggctcagccatctacacatatctccaatccatccacaattattctgagcgtgagggaaaatttgttgcccttttttatactataattacccccattctcaatcctctcatttatacactaaggaacaaagaagttaaaaaggccataaagaggttgttcaagagaaagtgctgcaggagaaggtgagcggccgc

SEQ ID NO: 449 - DNA, 1112 bp, synthetic construct
  source 1..1112: mol_type = other DNA; note = mmLucy-FLAG-rho-OR2Z1
ggatccgccaccatgagccaccagatcctgctgctcctggccctgctgaccctaggcctggctgattacaaggacgacgacgataagatcgaattgatgaacgggaccgagggcccaaacttctacgtgcctttctccaacaagacgggcgtggtggaattcatgggggatgtgaatcagtcggtggcctcagacttcattctggtgggcctcttcagtcactcaggatcacgccagctcctcttctccctggtggctgtcatgtttgtcataggccttctgggcaacaccgttcttctcttcttgatccgtgtggactcccggctccatacacccatgtacttcctgctcagccagctctccctgtttgacattggctgtcccatggtcaccatccccaagatggcatcagactttctgcggggagaaggtgccacctcctatggaggtggtgcagctcaaatattcttcctcacactgatgggtgtggctgagggcgtcctgttggtcctcatgtcttatgaccgttatgttgctgtgtgccagcccctgcagtatcctgtacttatgagacgccaggtatgtctgctgatgatgggctcctcctgggtggtaggtgtgctcaacgcctccatccagacctccatcaccctgcattttccctactgtgcctcccgtattgtggatcacttcttctgtgaggtgccagccctactgaagctctcctgtgcagatacctgtgcctacgagatggcgctgtccacctcaggggtgctgatcctaatgctccctctttccctcatcgccacctcctacggccacgtgttgcaggctgttctaagcatgcgctcagaggaggccagacacaaggctgtcaccacctgctcctcgcacatcacggtagtggggctcttttatggtgccgccgtgttcatgtacatggtgccttgcgcctaccacagtccacagcaggataacgtggtttccctcttctatagccttgtcacccctacactcaacccccttatctacagtctgaggaacaaagaagttaaaaaggccataaagaggttgttcaagagaaagtgctgcaggagaaggtgagcggccgc

SEQ ID NO: 450 - DNA, 1121 bp, synthetic construct
  source 1..1121: mol_type = other DNA; note = mmLucy-FLAG-rho-OR3A1(R125Q)
ggatccgccaccatgagccaccagatcctgctgctcctggccctgctgaccctaggcctggctgattacaaggacgacgacgataagatcgaattgatgaacgggaccgagggcccaaacttctacgtgcctttctccaacaagacgggcgtggtggaattcatgcagccagaatctggggccaatggaacagtcattgctgagttcatcctgctgggcttgctggaggcgccagggctgcagccagttgtctttgtgctcttcctctttgcctacctggtcacggtcaggggcaacctcagcatcctggcagctgtcttggtggagcccaaactccacacccccatgtacttcttcctggggaacctatcagtgctggatgttgggtgcatcagcgtcactgttccatcaatgttgagtcgtctcctgtcccgcaagcgtgcagttccctgtggggcctgccttacccagctcttcttcttccatctgttcgttggagtggactgcttcctgctgaccgccatggcctatgaccaattcctggccatctgccggcccctcacctacagcacccgcatgagtcagacagtccagaggatgttggtggctgcgtcctgggcttgtgctttcaccaacgcactgacccacactgtggccatgtccacgctcaacttctgtggccccaatgtgatcaatcacttctactgtgacctcccacagctcttccagctctcctgctccagcacccaactcaatgagctgctgctttttgctgtgggttttataatggcaggtacccccatggctctcattgtcatctcctatatccacgtggcagctgcagtcctgcgaattcgctctgtagagggcaggaagaaagccttctccacatgtggctcccacctcactgtggttgccatattctatggttcaggtatctttaactatatgcgactgggttcaaccaagctttcagacaaggataaagctgttggaattttcaacactgtcatcaatcccatgctgaacccaatcatctacagcttcaggaacaaagaagttaaaaaggccataaagaggttgttcaagagaaagtgctgcaggagaaggtgagcggccgc

SEQ ID NO: 451 - DNA, 1121 bp, synthetic construct
  source 1..1121: mol_type = other DNA; note = mmLucy-FLAG-rho-OR3A1
ggatccgccaccatgagccaccagatcctgctgctcctggccctgctgaccctaggcctggctgattacaaggacgacgacgataagatcgaattgatgaacgggaccgagggcccaaacttctacgtgcctttctccaacaagacgggcgtggtggaattcatgcagccagaatctggggccaatggaacagtcattgctgagttcatcctgctgggcttgctggaggcgccagggctgcagccagttgtctttgtgctcttcctctttgcctacctggtcacggtcaggggcaacctcagcatcctggcagctgtcttggtggagcccaaactccacacccccatgtacttcttcctggggaacctatcagtgctggatgttgggtgcatcagcgtcactgttccatcaatgttgagtcgtctcctgtcccgcaagcgtgcagttccctgtggggcctgccttacccagctcttcttcttccatctgttcgttggagtggactgcttcctgctgaccgccatggcctatgaccgattcctggccatctgccggcccctcacctacagcacccgcatgagtcagacagtccagaggatgttggtggctgcgtcctgggcttgtgctttcaccaacgcactgacccacactgtggccatgtccacgctcaacttctgtggccccaatgtgatcaatcacttctactgtgacctcccacagctcttccagctctcctgctccagcacccaactcaatgagctgctgctttttgctgtgggttttataatggcaggtacccccatggctctcattgtcatctcctatatccacgtggcagctgcagtcctgcgaattcgctctgtagagggcaggaagaaagccttctccacatgtggctcccacctcactgtggttgccatattctatggttcaggtatctttaactatatgcgactgggttcaaccaagctttcagacaaggataaagctgttggaattttcaacactgtcatcaatcccatgctgaacccaatcatctacagcttcaggaacaaagaagttaaaaaggccataaagaggttgttcaagagaaagtgctgcaggagaaggtgagcggccgc

SEQ ID NO: 452 - DNA, 1121 bp, synthetic construct
  source 1..1121: mol_type = other DNA; note = mmLucy-FLAG-rho-OR3A2
ggatccgccaccatgagccaccagatcctgctgctcctggccctgctgaccctaggcctggctgattacaaggacgacgacgataagatcgaattgatgaacgggaccgagggcccaaacttctacgtgcctttctccaacaagacgggcgtggtggaattcatggagccagaagctgggaccaataggaccgctgttgctgagttcattctactgggcctagtgcaaacagaagagatgcagccagttgtctttgtgctcctcctctttgcctatctggtcacaactgggggcaacctcagcatcctggcagccgtcttggtggagcccaaactccacgcccccatgtacttcttcctggggaacctgtcagtgctggatgtcggatgtatcactgtcactgttcctgcaatgttgggtcgtctcttgtcccacaagtccacaatttcctatgacgcctgcctctcccagctcttcttcttccaccttctggctgggatggactgcttcctgctgaccgccatggcctatgaccgactcctggccatctgccagcccctcacctacagcacccgcatgagtcagacagtccagaggatgttggtggctgcgtccttggcttgtgccttcaccaacgcactgacccacactgtggccatgtccacgctcaacttctgtggccccaatgaggtcaatcacttctactgtgacctcccacagctcttccagctctcctgctccagcacccaactcaatgagctgctgctctttgctgtgggtttcatcatggcaggcacacctttggttctcatcatcactgcctacagccacgtggcagctgcagttctacgaatccgttcagtggagggccgaaagaaggccttctccacgtgtggctcccacctcaccgtggtttgtcttttctttggaagaggtatcttcaactacatgagactgggttcagaggaggcttcagacaaggataaaggggttggagttttcaacactgttatcaaccctatgctgaaccctcttatctacagcctcaggaacaaagaagttaaaaaggccataaagaggttgttcaagagaaagtgctgcaggagaaggtgagcggccgc

SEQ ID NO: 453 - DNA, 1121 bp, synthetic construct
  source 1..1121: mol_type = other DNA; note = mmLucy-FLAG-rho-OR3A3
ggatccgccaccatgagccaccagatcctgctgctcctggccctgctgaccctaggcctggctgattacaaggacgacgacgataagatcgaattgatgaacgggaccgagggcccaaacttctacgtgcctttctccaacaagacgggcgtggtggaattcatggagccagaagctgggaccaataggaccgctgttgctgagttcattctactgggcctagtgcaaacagaagagatgcagccagttgtctttgtgctcctcctctttgcctatctggtcacaactgggggcaacctcagcatcctggcagccgtcttggtggagcccaaactccacgcccccatgtacttcttcctggggaacctgtcagtgctggatgtcggatgtatcactgtcactgttcctgcaatgttgggtcgtctcttgtcccacaagtccacaatttcctatgacgcctgcctctcccagctcttcttcttccaccttctggctgggatggactgcttcctgctgaccgccatggcctatgaccgactcctggccatctgccagcccctcacctacagcacccgcatgagtcagacagtccagaggatgttggtggctgcgtcctgggcttgtgccttcaccaacgcactgacccacactgtggccatgtccacgctcaacttctgtggccccaatgaggtcaatcacttctactgtgacctcccacagctcttccagctctcctgctccagcacccaactcaatgagctgctgctctttgtagcagcagccttcatggctgtggcacccttggtcttcatcagtgtgtcctatgcccatgtggtagctgctgtgctgcaaatccgctctgctgagggcagaaagaaggccttctccacatgtggctcccacctcactgtggtgggcatcttctatgggacaggtgtcttcagctacatgaggctgggttcagtggaatcttcagacaaggataagggggttggggttttcatgactgtgatcaaccccatgctgaacccacttatctacagcctcaggaacaaagaagttaaaaaggccataaagaggttgttcaagagaaagtgctgcaggagaaggtgagcggccgc

SEQ ID NO: 454 - DNA, 1097 bp, synthetic construct
  source 1..1097: mol_type = other DNA; note = mmLucy-FLAG-rho-OR4A47(I104L,V145M)
ggatccgccaccatgagccaccagatcctgctgctcctggccctgctgaccctaggcctggctgattacaaggacgacgacgataagatcgaattgatgaacgggaccgagggcccaaacttctacgtgcctttctccaacaagacgggcgtggtggaattcatggagccaaggaaaaatgtgactgactttgtcctcttgggcttcacacagaatccaaaggagcagaaagtactttttgttatgttcttgctcttctacattttgaccatggtgggcaacctgctcattgtagtgaccgtaactgtcagtgagaccctgggctcaccaatgtacttctttcttgctggcttatcatttatagatatcatttattcttcatccatttcccccagattgatttcaggcttgttctttgggaataattccatatccttccaatcttgcatggcccagctctttatcgagcaccttttcggtgggtcagaggtctttctcctgttggtgatggcctatgactgctatgtggccatctgtaagcccttgcattatttggttatcatgagacaatgggtgtgtgttgtgctgctggtaatgtcctgggttggaggatttctgcactcagtatttcaacttagcattatttatgggctcccattctgtggccccaatgtcattgatcattttttctgtgacatgtatcccttattgaaactggtctgcactgacacccatgctattggcctcttagtggtggccaatggaggactggcttgcactattgtgtttctgctcttactcatctcttatggtgtcatcttgcactctttaaagaaccttagtcagaaagggaggcaaaaagccctctcaacctgcagttcccacatgactgtggttgtcttcttctttgttccttgtatttttatgtatgctagacctgctaggaccttccccattgacaaatcagtgagtgtgttttatacagtcataaccccaatgctgaaccccttaatctacactctgaggaacaaagaagttaaaaaggccataaagaggttgttcaagagaaagtgctgcaggagaaggtgagcggccgc

SEQ ID NO: 455 - DNA, 1097 bp, synthetic construct
  source 1..1097: mol_type = other DNA; note = mmLucy-FLAG-rho-OR4A47
ggatccgccaccatgagccaccagatcctgctgctcctggccctgctgaccctaggcctggctgattacaaggacgacgacgataagatcgaattgatgaacgggaccgagggcccaaacttctacgtgcctttctccaacaagacgggcgtggtggaattcatggagccaaggaaaaatgtgactgactttgtcctcttgggcttcacacagaatccaaaggagcagaaagtactttttgttatgttcttgctcttctacattttgaccatggtgggcaacctgctcattgtagtgaccgtaactgtcagtgagaccctgggctcaccaatgtacttctttcttgctggcttatcatttatagatatcatttattcttcatccatttcccccagattgatttcaggcttgttctttgggaataattccatatccttccaatcttgcatggcccagctctttatcgagcacattttcggtgggtcagaggtctttctcctgttggtgatggcctatgactgctatgtggccatctgtaagcccttgcattatttggttatcatgagacaatgggtgtgtgttgtgctgctggtagtgtcctgggttggaggatttctgcactcagtatttcaacttagcattatttatgggctcccattctgtggccccaatgtcattgatcattttttctgtgacatgtatcccttattgaaactggtctgcactgacacccatgctattggcctcttagtggtggccaatggaggactggcttgcactattgtgtttctgctcttactcatctcttatggtgtcatcttgcactctttaaagaaccttagtcagaaagggaggcaaaaagccctctcaacctgcagttcccacatgactgtggttgtcttcttctttgttccttgtatttttatgtatgctagacctgctaggaccttccccattgacaaatcagtgagtgtgttttatacagtcataaccccaatgctgaaccccttaatctacactctgaggaacaaagaagttaaaaaggccataaagaggttgttcaagagaaagtgctgcaggagaaggtgagcggccgc

SEQ ID NO: 456 - DNA, 1094 bp, synthetic construct
  source 1..1094: mol_type = other DNA; note = mmLucy-FLAG-rho-OR4A5
ggatccgccaccatgagccaccagatcctgctgctcctggccctgctgaccctaggcctggctgattacaaggacgacgacgataagatcgaattgatgaacgggaccgagggcccaaacttctacgtgcctttctccaacaagacgggcgtggtggaattcatgagacagaataacaatattacagaatttgtcctcctgggcttttctcaggatcctggtgtgcaaaaagcattatttgtcatgtttttactcacatacttggtgacagtggtggggaacctgctcattgtggtggatattattgccagcccttccttgggttccccaatgtatttcttccttgcctgcctgtcatttatagatgctgcatattccactaccatttctcccaagttaattgtaggcttattctgtgataaaaagactatttccttccaaggttgcatgggccagctatttatagaccatttctttggtggggctgaggtcttccttctggtggtgatggcctgtgatcgctatgtggccatctgtaagccactgcactatttgaccatcatgaatcgacaggtttgcttccttctgttggtggtggccatgattggaggttttgtacattctgcgtttcaaattgttgtgtacagtctccctttctgtggtcccaatgtcattgttcatttcagttgtgacatgcacccattactggaactggcatgcactgacacctactttataggcctcactgttgttgtcaatagtggagcaatctgtatggtcattttcaaccttctgttaatctcctatggagtcatcctaagctcccttaaaacttacagtcaggaaaagaggggtaaagccttgtctacctgcagctccggcagtaccgttgttgtcctcttttttgtaccctgtattttcatatatgttagacctgtttcaaactttcctactgataagttcatgactgtgttttataccattatcacacacatgctgagtcctttaatatatacgttgaggaacaaagaagttaaaaaggccataaagaggttgttcaagagaaagtgctgcaggagaaggtgagcggccgc

SEQ ID NO: 457 - DNA, 1097 bp, synthetic construct
  source 1..1097: mol_type = other DNA; note = mmLucy-FLAG-rho-OR4B1
ggatccgccaccatgagccaccagatcctgctgctcctggccctgctgaccctaggcctggctgattacaaggacgacgacgataagatcgaattgatgaacgggaccgagggcccaaacttctacgtgcctttctccaacaagacgggcgtggtggaattcatggccagtacaagtaatgtgactgagttgattttcactggccttttccaggatccagctgtgcagagtgtatgctttgtggtgtttctccccgtgtaccttgccacggtggtgggcaatggcctcatcgttctgacggtcagtatcagcaagagtctggattctcccatgtacttcttccttagctgcctgtccttggtggagatcagttattcctccactatcgcccctaaattcatcatagacttacttgccaagattaaaaccatctctctggaaggctgtctgactcagatattcttcttccacttctttggggttgctgagatccttttgattgtggtgatggcctatgattgctacgtggccatttgcaagcctcttcattatatgaacattatcagtcgtcaactgtgtcaccttctggtggctggttcctggctggggggcttttgtcactccataattcagattctcgttatcatccaattgcccttctgtggtcccaatgtgattgaccactatttctgtgacctccagcctttattcaagcttgcctgcactgacaccttcatggagggggttattgtgttggccaacagtggattattctctgtcttctccttcctcatcttggtgtcctcttatattgtcattctggtcaacttgaggaaccattctgcagaggggaggcacaaagccctctccacctgtgcttctcacatcacagtggtcatcttgttttttggacctgctatcttcctctacatgcgaccttcttccactttcactgaagataaacttgtggctgtattctacacggtcatcacccccatgctgaaccccatcatttacacactcaggaacaaagaagttaaaaaggccataaagaggttgttcaagagaaagtgctgcaggagaaggtgagcggccgc

SEQ ID NO: 458 - DNA, 1097 bp, synthetic construct
  source 1..1097: mol_type = other DNA; note = mmLucy-FLAG-rho-OR4C11
ggatccgccaccatgagccaccagatcctgctgctcctggccctgctgaccctaggcctggctgattacaaggacgacgacgataagatcgaattgatgaacgggaccgagggcccaaacttctacgtgcctttctccaacaagacgggcgtggtggaattcatgcagcaaaataacagtgtgcctgaattcatactgttaggattaacacaggatcccttgaggcagaaaatagtgtttgtaatcttcttaattttctatatgggaactgtggtggggaatatgctcattattgtgaccatcaagtccagccggacactaggaagccccatgtacttctttctattttatttgtcctttgcagattcttgcttttcaacttccacagcccctagattaattgtggatgctctctctgaaaagaaaattataacctacaatgagtgcatgacacaagtctttgcactacatttatttggctgcatggagatctttgtcctcattctcatggctgttgatcgctatgtggccatctgtaagcccttgcgttacccaaccatcatgagccagcaggtctgcatcatcctgattgttcttgcctggatagggtctttaatacactctacagctcagattatcctggccttaagattgcctttctgtggaccctatttgattgatcattattgctgtgatttgcagcccttgttgaaacttgcctgcatggacacttacatgatcaacctgctgttggtgtctaacagtggggcaatttgctcaagtagtttcatgattttgataatttcatatattgtcatcttgcattcactgagaaaccacagtgccaaagggaagaaaaaggctctctccgcttgcacgtctcacataattgtagtcatcttattctttggcccatgtatattcatatatacacgccccccgaccactttccccatggacaagatggtggcagtattttatactattggaacaccctttctcaatccactcatctacacactgaggaacaaagaagttaaaaaggccataaagaggttgttcaagagaaagtgctgcaggagaaggtgagcggccgc

SEQ ID NO: 459 - DNA, 1097 bp, synthetic construct
  source 1..1097: mol_type = other DNA; note = mmLucy-FLAG-rho-OR4C12(V283L)
ggatccgccaccatgagccaccagatcctgctgctcctggccctgctgaccctaggcctggctgattacaaggacgacgacgataagatcgaattgatgaacgggaccgagggcccaaacttctacgtgcctttctccaacaagacgggcgtggtggaattcatggagaagaaaaagaatgtgactgaattcattttaataggtcttacacagaaccccataatggagaaagtcacgtttgtagtatttttggttctttacatgataacactttcaggcaacctgctcattgtggttaccattaccaccagccaggctctgagctcccccatgtacttcttcctgacccacctttctttgatagacacagtttattcttcttcttcagctcctaagttgattgtggattcctttcaagagaagaaaatcatctcctttaatgggtgtatggctcaagcctatgcagaacacatttttggtgctactgagatcatcctgctgacagtgatggcctgtgactgctatgtggccatctgcaaacctctgaactacacaaccattatgagccacagcctgtgcattctcctggtggcagtggcctgggtgggaggatttcttcatgcaactattcagattctctttacagtatggctgcccttctgtggccccaatgtcataggccacttcatgtgtgacttgtacccattgttaaaacttgtttgcatagacactcatacccttggtctctttgttgctgtgaacagtgggtttatctgcttattaaacttccttatcttggtggtatcctatgtgatcatcttgagatctttaaagaacaatagcttggaggggaggtgtaaagccctctccacctgtatttctcacatcatagtagttgtcttattctttgtgccctgtatatttgtgtatctgcgctcagtgaccactctgcccattgataaagctgttgctgtattttatactatggtggtcccaatgttaaatcccttggtctacacactcaggaacaaagaagttaaaaaggccataaagaggttgttcaagagaaagtgctgcaggagaaggtgagcggccgc

SEQ ID NO: 460 - DNA, 1097 bp, synthetic construct
  source 1..1097: mol_type = other DNA; note = mmLucy-FLAG-rho-OR4C13(V133I)
ggatccgccaccatgagccaccagatcctgctgctcctggccctgctgaccctaggcctggctgattacaaggacgacgacgataagatcgaattgatgaacgggaccgagggcccaaacttctacgtgcctttctccaacaagacgggcgtggtggaattcatggcgaatagaaacaatgtgacagagtttattctattggggcttacagagaatccaaaaatgcagaaaatcatatttgttgtgttttctgtcatctacatcaacgccatgataggaaatgtgctcattgtggtcaccatcactgccagcccatcactgagatcccccatgtactttttcctggcctatctctcctttattgatgcctgctattcctctgtcaatacccctaagctgatcacagattcactctatgaaaacaagactatcttattcaatggatgtatgactcaagtctttggagaacattttttcagaggtgttgaggtcatcctacttactgtaatggcctatgaccactatgtggccatctgcaagcccttgcactataccaccatcatgaagcagcatgtttgtagcctgctagtgggagtgtcatgggtaggaggctttcttcatgcaaccatacagatcctcttcatctgtcaattacctttctgtggtcctaatgtcatagatcactttatgtgtgatctctacactttgatcaatcttgcctgcactaatacccacactctaggactcttcattgctgccaacagtgggttcatatgcctgttaaactgtctcttgctcctggtctcctgcgtggtcatactgtactccttaaagacccacagcttagaggcaaggcacgaagccctctctacctgtgtctcccacatcacagttgtcatcttatcctttataccctgcatatttgtgtacatgagacctccagctactttacccattgataaagcagttgctgtattctacactatgataacttctatgttaaaccccttaatctacaccttgaggaacaaagaagttaaaaaggccataaagaggttgttcaagagaaagtgctgcaggagaaggtgagcggccgc

SEQ ID NO: 461 - DNA, 1100 bp, synthetic construct
  source 1..1100: mol_type = other DNA; note = mmLucy-FLAG-rho-OR4C15
ggatccgccaccatgagccaccagatcctgctgctcctggccctgctgaccctaggcctggctgattacaaggacgacgacgataagatcgaattgatgaacgggaccgagggcccaaacttctacgtgcctttctccaacaagacgggcgtggtggaattcatgcaaaaccaaagctttgtaactgagtttgtcctcctgggactttcacagaatccaaatgttcaggaaatagtatttgttgtatttttgtttgtctacattgcaactgttgggggcaacatgctaattgtagtaaccattctcagcagccctgctcttctggtgtctcctatgtacttcttcttgggcttcctgtccttcctggatgcgtgcttctcatctgtcatcaccccaaagatgattgtagactccctctatgtgacaaaaaccatctcttttgaaggctgcatgatgcagctctttgctgaacacttctttgctggggtggaggtgattgtcctcacagccatggcctatgatcgttatgtggccatttgcaagcccttgcattactcttctatcatgaacaggaggctctgtggcattctgatgggggtagcctggacagggggcctcttgcattccatgatacaaattctttttactttccagcttcccttttgtggccccaatgtcatcaatcactttatgtgtgacttgtacccgttactggagcttgcctgcactgatactcacatctttggcctcatggtggtcatcaacagtgggtttatctgcatcataaacttctccttgttgcttgtctcctatgctgtcatcttgctctctctgagaacacacagttctgaagggcgctggaaagctctctccacctgtggatctcacattgctgttgtgattttgttctttgtcccatgcatatttgtatatacacgacctccatctgctttttcccttgacaaaatggcggcaatattttatatcatcttaaatcccttgctcaatcctttgatttacactttcaggaacaaagaagttaaaaaggccataaagaggttgttcaagagaaagtgctgcaggagaaggtgagcggccgc

SEQ ID NO: 462 - DNA, 1097 bp, synthetic construct
  source 1..1097: mol_type = other DNA; note = mmLucy-FLAG-rho-OR4C16(T76A)
ggatccgccaccatgagccaccagatcctgctgctcctggccctgctgaccctaggcctggctgattacaaggacgacgacgataagatcgaattgatgaacgggaccgagggcccaaacttctacgtgcctttctccaacaagacgggcgtggtggaattcatgcaactgaataataatgtgactgagttcattctgcttggattgacacaggatcctttttggaagaaaatagtgtttgttatttttttgcgtctctacttgggaacactgttgggtaatttgctaatcattattagtgtcaagaccagccaggcacttaagaacccaatgttcttcttccttttctacttatccttatctgatacttgcctctctacttccatagcccctagaatgattgtggatgcccttttgaagaagacaactatctccttcagcgagtgcatgatccaagtcttttcatcccatgtctttggctgcctggagatcttcatcctcatcctcacggctgttgaccgctatgtggacatctgtaagcccctgcactacatgaccatcataagccagtgggtctgtggtgttttgatggctgtggcctgggtgggatcctgtgtgcattctttagttcagatttttcttgccctgagtttgccattctgtggccccaatgtgatcaatcactgtttctgtgacttgcagcccttgttgaaacaagcctgttcagaaacctatgtggttaacctactcctggtttccaatagtggggccatttgtgcagtgagttatgtcatgctaatattctcctatgtcatcttcttgcattctctgagaaaccacagtgctgaagtgataaagaaagcactttccacatgtgtctcccacatcattgtggtcatcttgttctttggaccttgcatatttatgtacacatgccttgcaaccgtattccccatggataagatgatagctgtattttatacagttggaacatcttttctcaaccctgtgatttacacgctgaggaacaaagaagttaaaaaggccataaagaggttgttcaagagaaagtgctgcaggagaaggtgagcggccgc

SEQ ID NO: 463 - DNA, 1097 bp, synthetic construct
  source 1..1097: mol_type = other DNA; note = mmLucy-FLAG-rho-OR4C3
ggatccgccaccatgagccaccagatcctgctgctcctggccctgctgaccctaggcctggctgattacaaggacgacgacgataagatcgaattgatgaacgggaccgagggcccaaacttctacgtgcctttctccaacaagacgggcgtggtggaattcatggacataccacaaaatatcacagaatttttcatgctggggctctcacagaactcagaggtacagagagttctctttgtggtctttttgctgatctatgtggtcacggtttgtggcaacatgctcattgtggtcactatcacctccagccccacgctggcttcccctgtgtattttttcctggccaacctatcctttattgacaccttttattcttcttctatggctcctaaactcattgctgactcattgtatgaggggagaaccatctcttatgagtgctgcatggctcagctctttggagctcattttttgggaggtgttgagatcattctgctcacagtgatggcttatgaccgctatgtggccatctgtaagcccctgcacaatactaccatcatgaccaggcatctctgtgccatgcttgtaggggtggcttggcttgggggcttcctgcattcattggttcagctcctcctggtcctttggttgcccttctgtgggcccaatgtgatcaatcactttgcctgtgacttgtaccctttgctggaagttgcctgcaccaatacgtatgtcattggtctgctggtggttgccaacagtggtttaatctgcctgttgaacttcctcatgctggctgcctcctacattgtcatcctgtactccttgaggtcccacagtgcagatgggagatgcaaagccctctccacctgtggagcccacttcattgttgttgccttgttctttgtgccctgtatatttacttatgtgcatccattttctactttacctatagacaaaaatatggcattattttatggtattctgacacctatgttgaatccactcatttataccctgaggaacaaagaagttaaaaaggccataaagaggttgttcaagagaaagtgctgcaggagaaggtgagcggccgc

SEQ ID NO: 464 - DNA, 1097 bp, synthetic construct
  source 1..1097: mol_type = other DNA; note = mmLucy-FLAG-rho-OR4C3(V257M,H258L,P264S)
ggatccgccaccatgagccaccagatcctgctgctcctggccctgctgaccctaggcctggctgattacaaggacgacgacgataagatcgaattgatgaacgggaccgagggcccaaacttctacgtgcctttctccaacaagacgggcgtggtggaattcatggacataccacaaaatatcacagaatttttcatgctggggctctcacagaactcagaggtacagagagttctctttgtggtctttttgctgatctatgtggtcacggtttgtggcaacatgctcattgtggtcactatcacctccagccccacgctggcttcccctgtgtattttttcctggccaacctatcctttattgacaccttttattcttcttctatggctcctaaactcattgctgactcattgtatgaggggagaaccatctcttatgagtgctgcatggctcagctctttggagctcattttttgggaggtgttgagatcattctgctcacagtgatggcttatgaccgctatgtggccatctgtaagcccctgcacaatactaccatcatgaccaggcatctctgtgccatgcttgtaggggtggcttggcttgggggcttcctgcattcattggttcagctcctcctggtcctttggttgcccttctgtgggcccaatgtgatcaatcactttgcctgtgacttgtaccctttgctggaagttgcctgcaccaatacgtatgtcattggtctgctggtggttgccaacagtggtttaatctgcctgttgaacttcctcatgctggctgcctcctacattgtcatcctgtactccttgaggtcccacagtgcagatgggagatgcaaagccctctccacctgtggagcccacttcattgttgttgccttgttctttgtgccctgtatatttacttatatgcttccattttctactttatctatagacaaaaatatggcattattttatggtattctgacacctatgttgaatccactcatttataccctgaggaacaaagaagttaaaaaggccataaagaggttgttcaagagaaagtgctgcaggagaaggtgagcggccgc

SEQ ID NO: 465 - DNA, 1088 bp, synthetic construct
  source 1..1088: mol_type = other DNA; note = mmLucy-FLAG-rho-OR4C45
ggatccgccaccatgagccaccagatcctgctgctcctggccctgctgaccctaggcctggctgattacaaggacgacgacgataagatcgaattgatgaacgggaccgagggcccaaacttctacgtgcctttctccaacaagacgggcgtggtggaattcatgaacaatgtaacagaattcatcctgctgggcctcactcacaatccagaactgcagaaattcctgtttgttatgtttttaatcacctacttgatcacactggcaggtaacctgctcatctcagtcatcatcttcatcagcccagccctgggttcccccatgtacctttttctgtcctatttatccattatagatattttctactcttcttccatagcccctaaaatgatctttgacttgatctctgaaaacaacaccatatccttcaatggctgcatgactcagctcttcacagaacatttctttgcggcagctgagaccatcttattaagtgtcatggcctacgactgctatgtggccatctgtaagcccttgcactatgcaaccatcatgacccaatctatgtgtggattcctgatggtggtggctggaattctgggatttgtgcatggaggaatccagactttgttcatagcccagttaccattctgtggccccaatgtcatcgaccactttatgtgtgatttagtacctcttctggagctggcctgcacagacactcacactttagggcctctgattgctgccaacagtgggtcactgtgtttcctcattttttccatactggatgcttcctatgtcatcatcttgtgctccctaaggtctcatagctctgaagggcatctcaaagctctgtctagttgtgcctctcatatcttcactgtcatcttattctttgtcccttgttcatacctgtatctaagacctctaacctccttccccactgacaaagctgtgactgtgttttgcaccctatttacacctatgttgaaccctttaatctacactgtcaggaacaaagaagttaaaaaggccataaagaggttgttcaagagaaagtgctgcaggagaaggtgagcggccgc

SEQ ID NO: 466 - DNA, 1097 bp, synthetic construct
  source 1..1097: mol_type = other DNA; note = mmLucy-FLAG-rho-OR4C46(S240F)
ggatccgccaccatgagccaccagatcctgctgctcctggccctgctgaccctaggcctggctgattacaaggacgacgacgataagatcgaattgatgaacgggaccgagggcccaaacttctacgtgcctttctccaacaagacgggcgtggtggaattcatggagaataggaataacatgacagagtttgttttgctggggcttacagagaatccaaagatgcagaaaatcatatttgttgtgttttttgtcatctatatcatcactgtggtgggatatgtgctcattgtggtcaccatcactgccagcccatcactggggtcccccatgtacctttccctggcctatctctcctttattgatgcctgctattcctctgtcaatacccctaacctgatcacacattcactctatggaaagaaggccatcctattcaatggatgcatgactcaagtctttggagaacatttcttcggaggtgcagagggcatcctacttactgtgatggcctatgaccactatgtggccatctgcaagcccttgcactatatgactatcatgaaccagtgtgtgtgtgccctgctaatgggagtggtgtggatgggaggctttcttcatgcaaccatacagatcctcttcatcttccaattacctttctgtggtcctaatgtcatagatcactttatgtgtgatctgaaccctttgctcaacctcgcctgcactgacacccatatgctggaactcttcattgctgccaacagtggattcatctgcttgttaaactttgccctcctgctggtctcctatgtggtcatcttgtgctccctaaggactcatagcttggaggcaaggcacaaagccctctccacctgtgtcttccacatcacggttgtcatcttattctttgtgccctgcatatttgtgtacatgagacctgcagctactttacctattgataaagcagttgctatattctacactatgataactcctatgttaaaccccttaatctataccttgaggaacaaagaagttaaaaaggccataaagaggttgttcaagagaaagtgctgcaggagaaggtgagcggccgc

SEQ ID NO: 467 - DNA, 1097 bp, synthetic construct
  source 1..1097: mol_type = other DNA; note = mmLucy-FLAG-rho-OR4C46
ggatccgccaccatgagccaccagatcctgctgctcctggccctgctgaccctaggcctggctgattacaaggacgacgacgataagatcgaattgatgaacgggaccgagggcccaaacttctacgtgcctttctccaacaagacgggcgtggtggaattcatggagaataggaataacatgacagagtttgttttgctggggcttacagagaatccaaagatgcagaaaatcatatttgttgtgttttttgtcatctatatcatcactgtggtgggatatgtgctcattgtggtcaccatcactgccagcccatcactggggtcccccatgtacctttccctggcctatctctcctttattgatgcctgctattcctctgtcaatacccctaacctgatcacacattcactctatggaaagaaggccatcctattcaatggatgcatgactcaagtctttggagaacatttcttcggaggtgcagagggcatcctacttactgtgatggcctatgaccactatgtggccatctgcaagcccttgcactatatgactatcatgaaccagtgtgtgtgtgccctgctaatgggagtggtgtggatgggaggctttcttcatgcaaccatacagatcctcttcatcttccaattacctttctgtggtcctaatgtcatagatcactttatgtgtgatctgaaccctttgctcaacctcgcctgcactgacacccatatgctggaactcttcattgctgccaacagtggattcatctgcttgttaaactttgccctcctgctggtctcctatgtggtcatcttgtgctccctaaggactcatagcttggaggcaaggcacaaagccctctccacctgtgtctcccacatcacggttgtcatcttattctttgtgccctgcatatttgtgtacatgagacctgcagctactttacctattgataaagcagttgctatattctacactatgataactcctatgttaaaccccttaatctataccttgaggaacaaagaagttaaaaaggccataaagaggttgttcaagagaaagtgctgcaggagaaggtgagcggccgc

SEQ ID NO: 468 - DNA, 1142 bp, synthetic construct
  source 1..1142: mol_type = other DNA; note = mmLucy-FLAG-rho-OR4C5
ggatccgccaccatgagccaccagatcctgctgctcctggccctgctgaccctaggcctggctgattacaaggacgacgacgataagatcgaattgatgaacgggaccgagggcccaaacttctacgtgcctttctccaacaagacgggcgtggtggaattcatgtatgtgtcaaattgcaatccttgtgctattcacagaaaaatcaattatccaaataccaaactggatttcgagcaagtgaacaacataacggaattcatcttgcttggcctgacacagaacgcagaggcacagaaactcttgtttgctgtgtttacactcatctactttctcaccatggtagacaacctaatcattgtggtgacaatcaccaccagcccagccctggactcccccgtgtatttttttctgtctttcttttccttcatagatggctgctcctcttctaccatggcccccaaaatgatatttgacttactcactgaaaagaaaactatttccttcagtgggtgcatgacccagctctttgtagaacatttctttgggggagttgagatcattctgctcgtggtgatggcctatgactgctatgtggccatctgcaagcccctgtactacctgatcacaatgaacaggcaggtatgtggcctcctggtggccatggcatgggtcgggggatttcttcacgctctgattcaaatgcttttaatagtctggctgcccttctgtggccccaatgtcattgaccatttcatctgtgaccttttccctctgctaaaactctcctgcactgacactcacgtctttggactctttgttgccgccaacagtgggctgatgtgtatgctcattttttctattcttattacctcttacgtcctaatcctctgctcacagcggaaggctctctctacctgcgccttccatatcactgtagtcgtcctattctttgttccctgtatattggtgtaccttcgacccatgatcaccttccctattgataaagctgtgtctgtgttttatactgtggtaacacccatgttaaaccctttaatctacaccctcaggaacaaagaagttaaaaaggccataaagaggttgttcaagagaaagtgctgcaggagaaggtgagcggccgc

SEQ ID NO: 469 - DNA, 1142 bp, synthetic construct
  source 1..1142: mol_type = other DNA; note = mmLucy-FLAG-rho-OR4C5(D77H)
ggatccgccaccatgagccaccagatcctgctgctcctggccctgctgaccctaggcctggctgattacaaggacgacgacgataagatcgaattgatgaacgggaccgagggcccaaacttctacgtgcctttctccaacaagacgggcgtggtggaattcatgtatgtgtcaaattgcaatccttgtgctattcacagaaaaatcaattatccaaataccaaactggatttcgagcaagtgaacaacataacggaattcatcttgcttggcctgacacagaacgcagaggcacagaaactcttgtttgctgtgtttacactcatctactttctcaccatggtagacaacctaatcattgtggtgacaatcaccaccagcccagccctgcactcccccgtgtatttttttctgtctttcttttccttcatagatggctgctcctcttctaccatggcccccaaaatgatatttgacttactcactgaaaagaaaactatttccttcagtgggtgcatgacccagctctttgtagaacatttctttgggggagttgagatcattctgctcgtggtgatggcctatgactgctatgtggccatctgcaagcccctgtactacctgatcacaatgaacaggcaggtatgtggcctcctggtggccatggcatgggtcgggggatttcttcacgctctgattcaaatgcttttaatagtctggctgcccttctgtggccccaatgtcattgaccatttcatctgtgaccttttccctctgctaaaactctcctgcactgacactcacgtctttggactctttgttgccgccaacagtgggctgatgtgtatgctcattttttctattcttattacctcttacgtcctaatcctctgctcacagcggaaggctctctctacctgcgccttccatatcactgtagtcgtcctattctttgttccctgtatattggtgtaccttcgacccatgatcaccttccctattgataaagctgtgtctgtgttttatactgtggtaacacccatgttaaaccctttaatctacaccctcaggaacaaagaagttaaaaaggccataaagaggttgttcaagagaaagtgctgcaggagaaggtgagcggccgc

SEQ ID NO: 470 - DNA, 1097 bp, synthetic construct
  source 1..1097: mol_type = other DNA; note = mmLucy-FLAG-rho-OR4C6
ggatccgccaccatgagccaccagatcctgctgctcctggccctgctgaccctaggcctggctgattacaaggacgacgacgataagatcgaattgatgaacgggaccgagggcccaaacttctacgtgcctttctccaacaagacgggcgtggtggaattcatggaaaatcaaaacaatgtgactgaattcattcttctgggtctcacagagaacctggagctgtggaaaatattttctgctgtgtttcttgtcatgtatgtagccacagtgctggaaaatctacttattgtggtaactattatcacaagtcagagtctgaggtcacctatgtatttttttcttaccttcttgtcccttttggatgtcatgttctcatctgtcgttgcccccaaggtgattgtagacaccctctccaagagcactaccatctctctcaaaggctgcctcacccagctgtttgtggagcatttctttggtggtgtggggatcatcctcctcactgtgatggcctatgaccgctacgtggccatctgtaagcccctgcactacacgatcatcatgagtccacgggtgtgctgcctaatggtaggaggggcttgggtggggggatttatgcacgcaatgatacaacttctcttcatgtatcaaatacccttctgtggtcctaatatcatagatcactttatatgtgatttgtttcagttgttgacacttgcctgcacggacacccacatcctgggcctcttagttaccctcaacagtgggatgatgtgtgtggccatctttcttatcttaattgcgtcctacacggtcatcctatgctccctgaagtcttacagctctaaagggcggcacaaagccctctctacctgcagctcccacctcacggtggttgtattgttctttgtcccctgtattttcttgtacatgaggcctgtggtcactcaccccatagacaaggcaatggctgtgtcagactcaatcatcacacccatgttaaatcccttgatctatacactgaggaacaaagaagttaaaaaggccataaagaggttgttcaagagaaagtgctgcaggagaaggtgagcggccgc

SEQ ID NO: 471 - DNA, 1103 bp, synthetic construct
  source 1..1103: mol_type = other DNA; note = mmLucy-FLAG-rho-OR4D1
ggatccgccaccatgagccaccagatcctgctgctcctggccctgctgaccctaggcctggctgattacaaggacgacgacgataagatcgaattgatgaacgggaccgagggcccaaacttctacgtgcctttctccaacaagacgggcgtggtggaattcatggaaccacagaacaccacacaggtatcaatgtttgtcctcttagggttttcacagacccaagagctccagaaattcctgttccttctgttcctgttagtctatgttaccaccattgtgggaaacctccttatcatggtcacagtgacttttgactgccggctccacacacccatgtattttctgctccgaaatctagctctcatagacctctgctattccacagtcacctctccaaagatgctggtggacttcctccatgagaccaagacgatctcctaccagggctgcatggcccagatcttcttcttccaccttttgggaggtgggactgtcttttttctctcagtcatggcctatgaccgctacatagccatctcccagcccctccggtatgtcaccatcatgaacactcaattgtgtgtgggcctggtagtagccgcctgggtggggggctttgtccactccattgtccaactggctctgatacttccactgcccttctgtggccccaatatcctagataacttctactgtgatgttccccaagtactgagacttgcctgcactgatacctccctcctggagttcctcatgatctccaacagtgggctgctagttatcatctggttcctcctccttctgatctcttatactgtcatcctggtgatgctgaggtcccactcgggaaaggcaaggaggaaggcagcttccacctgcaccacccacatcatcgtggtgtccatgatcttcattccctgtatctatatctatacctggcccttcaccccattcctcatggacaaggctgtgtccatcagctacacagtcatgacccccatgctcaaccccatgatctacaccctgaggaacaaagaagttaaaaaggccataaagaggttgttcaagagaaagtgctgcaggagaaggtgagcggccgc

SEQ ID NO: 472 - DNA, 1103 bp, synthetic construct
  source 1..1103: mol_type = other DNA; note = mmLucy-FLAG-rho-OR4D10
ggatccgccaccatgagccaccagatcctgctgctcctggccctgctgaccctaggcctggctgattacaaggacgacgacgataagatcgaattgatgaacgggaccgagggcccaaacttctacgtgcctttctccaacaagacgggcgtggtggaattcatggagatggaaaactgcaccagggtaaaagaatttattttccttggcctgacccagaatcgggaagtgagcttagtcttatttcttttcctactcttggtgtatgtgacaactttgctgggaaacctcctcatcatggtcactgttacctgtgaatctcgccttcacacgcccatgtattttttgctccataatttatctattgccgatatctgcttctcttccatcacagtgcccaaggttctggtggaccttctgtctgaaagaaagaccatctccttcaatcattgcttcactcagatgtttctattccaccttattggaggggtggatgtattttctctttcggtgatggcattggatcgatatgtggccatctccaagcccctgcactatgcgactatcatgagtagagaccattgcattgggctcacagtggctgcctggttggggggctttgtccactccatcgtgcagatttccctgttgctcccactccctttctgcggacccaatgttcttgacactttctactgtgatgtccaccgggtcctcaaactggcccatacagacattttcatacttgaactactaatgatttccaacaatggactgctcaccacactgtggtttttcctgctcctggtgtcctacatagtcatattatcattacccaagtctcaggcaggagagggcaggaggaaagccatctccacctgcacctcccacatcactgtggtgaccctgcatttcgtgccctgcatctatgtctatgcccggcccttcactgccctccccatggataaggccatctctgtcaccttcactgtcatctcccctctgctcaaccccttgatctacactctgaggaacaaagaagttaaaaaggccataaagaggttgttcaagagaaagtgctgcaggagaaggtgagcggccgc

SEQ ID NO: 473 - DNA, 1103 bp, synthetic construct
  source 1..1103: mol_type = other DNA; note = mmLucy-FLAG-rho-OR4D11
ggatccgccaccatgagccaccagatcctgctgctcctggccctgctgaccctaggcctggctgattacaaggacgacgacgataagatcgaattgatgaacgggaccgagggcccaaacttctacgtgcctttctccaacaagacgggcgtggtggaattcatggagttgggaaatgtcaccagagtaaaagaatttatatttctgggacttactcaatcccaagaccagagtttggtcttgtttctttttttatgtcttgtgtacatgacgactctgctgggaaacctcctcatcatggtcaccgtgacctgtgagtctcgccttcacacccccatgtacttcctgctccgcaatctagccatccttgacatctgcttctcctccacaactgctcctaaagtcttgctggaccttctgtcaaagaaaaagaccatatcctatacaagctgcatgacacagatatttctcttccacctccttggtggggcagacattttttctctctctgtgatggcgtttgactgctacatggccatctccaagcccctgcactatgtgaccatcatgagtagagggcaatgcactgccctcatctctgcctcttggatggggggctttgtccactccatcgtgcagatctccctgttgctgcctctccctttctgtggacccaatgttcttgacactttctactgcgatgtcccccaggtcctcaaactcacttgcactgacacttttgctcttgagttcttgatgatttccaacaatggcctggtcactaccctgtggtttatcttcctgcttgtgtcctacacagtcatcctaatgacgctgaggtctcaggcaggagggggcaggaggaaagccatctccacttgcacctcccacatcactgtggtgaccctgcattttgtgccctgcatctatgtctatgcccggcccttcactgccctccccacagaaaaggccatctctgtcaccttcactgtcatctcccctctgctgaaccctttgatctacactctgaggaacaaagaagttaaaaaggccataaagaggttgttcaagagaaagtgctgcaggagaaggtgagcggccgc

SEQ ID NO: 474 - DNA, 1103 bp, synthetic construct
  source 1..1103: mol_type = other DNA; note = mmLucy-FLAG-rho-OR4D11(F197L)
ggatccgccaccatgagccaccagatcctgctgctcctggccctgctgaccctaggcctggctgattacaaggacgacgacgataagatcgaattgatgaacgggaccgagggcccaaacttctacgtgcctttctccaacaagacgggcgtggtggaattcatggagttgggaaatgtcaccagagtaaaagaatttatatttctgggacttactcaatcccaagaccagagtttggtcttgtttctttttttatgtcttgtgtacatgacgactctgctgggaaacctcctcatcatggtcaccgtgacctgtgagtctcgccttcacacccccatgtacttcctgctccgcaatctagccatccttgacatctgcttctcctccacaactgctcctaaagtcttgctggaccttctgtcaaagaaaaagaccatatcctatacaagctgcatgacacagatatttctcttccacctccttggtggggcagacattttttctctctctgtgatggcgtttgactgctacatggccatctccaagcccctgcactatgtgaccatcatgagtagagggcaatgcactgccctcatctctgcctcttggatggggggctttgtccactccatcgtgcagatctccctgttgctgcctctccctttctgtggacccaatgttcttgacactttctactgcgatgtcccccaggtcctcaaactcacttgcactgacacttttgctcttgagctcttgatgatttccaacaatggcctggtcactaccctgtggtttatcttcctgcttgtgtcctacacagtcatcctaatgacgctgaggtctcaggcaggagggggcaggaggaaagccatctccacttgcacctcccacatcactgtggtgaccctgcattttgtgccctgcatctatgtctatgcccggcccttcactgccctccccacagaaaaggccatctctgtcaccttcactgtcatctcccctctgctgaaccctttgatctacactctgaggaacaaagaagttaaaaaggccataaagaggttgttcaagagaaagtgctgcaggagaaggtgagcggccgc

SEQ ID NO: 475 - DNA, 1103 bp, synthetic construct
  source 1..1103: mol_type = other DNA; note = mmLucy-FLAG-rho-OR4D2
ggatccgccaccatgagccaccagatcctgctgctcctggccctgctgaccctaggcctggctgattacaaggacgacgacgataagatcgaattgatgaacgggaccgagggcccaaacttctacgtgcctttctccaacaagacgggcgtggtggaattcatggaaacagggaacctcacgtgggtatcagactttgtcttcctggggctctcgcagactcgggagctccagcgtttcctgtttctaatgttcctgtttgtctacatcaccactgttatgggaaacatccttatcatcatcacagtgacctctgattcccagctccacacacccatgtactttctgctccgaaacctggctgtcctagacctctgtttctcttcagtcactgctcccaaaatgctagtggacctcctctctgagaagaaaaccatctcttaccagggctgcatgggtcagatcttcttcttccactttttgggaggtgccatggtcttcttcctctcagtgatggcctttgaccgcctcattgccatctcccggcccctccgctatgtcaccgtcatgaacactcagctctgggtggggctggtggtagccacctgggtgggaggctttgtccactctattgtccagctggctctgatgctcccactgcccttctgtggccccaacattttggataacttctactgtgatgttccccaagtactgagacttgcctgcactgacacctcactgctggagttcctcaagatctccaacagtgggctgctggatgtcgtctggttcttcctcctcctgatgtcctacttattcatcctggtgatgctgaggtcacatccaggggaggcaagaaggaaggcagcttccacctgcaccacccacatcatcgtggtttccatgatcttcgttccaagcatttacctctatgcccggcccttcactccattccctatggacaagcttgtgtccatcggccacacagtcatgacccccatgctcaaccccatgatctataccctgaggaacaaagaagttaaaaaggccataaagaggttgttcaagagaaagtgctgcaggagaaggtgagcggccgc

SEQ ID NO: 476 - DNA, 1103 bp, synthetic construct
  source 1..1103: mol_type = other DNA; note = mmLucy-FLAG-rho-OR4D5
ggatccgccaccatgagccaccagatcctgctgctcctggccctgctgaccctaggcctggctgattacaaggacgacgacgataagatcgaattgatgaacgggaccgagggcccaaacttctacgtgcctttctccaacaagacgggcgtggtggaattcatgaatccagcaaatcattcccaggtggcaggatttgttctactggggctctctcaggtttgggagcttcggtttgttttcttcactgttttctctgctgtgtattttatgactgtagtgggaaaccttcttattgtggtcatagtgacctccgacccacacctgcacacaaccatgtattttctcttgggcaatctttctttcctggacttttgctactcttccatcacagcacctaggatgctggttgacttgctctcaggcaaccctaccatttcctttggtggatgcctgactcaactcttcttcttccacttcattggaggcatcaagatcttcctgctgactgtcatggcgtatgaccgctacattgccatttcccagcccctgcactacacgctcattatgaatcagactgtctgtgcactccttatggcagcctcctgggtggggggcttcatccactccatagtacagattgcattgactatccagctgccattctgtgggcctgacaagctggacaacttttattgtgatgtgcctcagctgatcaaattggcctgcacagatacctttgtcttagagcttttaatggtgtctaacaatggcctggtgaccctgatgtgttttctggtgcttctgggatcgtacacagcactgctagtcatgctccgaagccactcacgggagggccgcagcaaggccctgtctacctgtgcctctcacattgctgtggtgaccttaatctttgtgccttgcatctacgtctatacaaggccttttcggacattccccatggacaaggccgtctctgtgctatacacaattgtcacccccatgctgaatcctgccatctataccctgaggaacaaagaagttaaaaaggccataaagaggttgttcaagagaaagtgctgcaggagaaggtgagcggccgc

SEQ ID NO: 477 - DNA, 1103 bp, synthetic construct
  source 1..1103: mol_type = other DNA; note = mmLucy-FLAG-rho-OR4D6
ggatccgccaccatgagccaccagatcctgctgctcctggccctgctgaccctaggcctggctgattacaaggacgacgacgataagatcgaattgatgaacgggaccgagggcccaaacttctacgtgcctttctccaacaagacgggcgtggtggaattcatggaccagatcaaccacactaatgtgaaggagtttttcttcctggaacttacacgttcccgagagctggagtttttcttgtttgtggtcttctttgctgtgtatgtagcaacagtcctgggaaatgcactcattgtggtcactattacctgtgagtcccgcctacacactcctatgtactttctcctgcggaacaaatcagtcctggacatcgttttttcatctatcaccgtccccaagttcctggtggatcttttatcagacaggaaaaccatctcctacaatggctgcatggcacagatctttttcttccactttgctggtggggcagatatttttttcctctctgtgatggcctatgacagataccttgcaatcgccaagcccctgcactatgtgaccatgatgaggaaagaggtgtgggtggccttggtggtggcttcttgggtgagtggtggtttgcattcaatcatccaggtaattctgatgcttccattccccttctgtggccccaacacactggatgccttctactgttatgtgctccaggtggtaaaactggcctgcactgacacctttgctttggagcttttcatgatctctaacaacggactggtgaccctgctctggttcctcctgctcctgggctcctacactgtcattctggtgatgctgagatcccactctggggaggggcggaacaaggccctctccacgtgcacgtcccacatgctggtggtgactcttcacttcgtgccttgtgtttacatctactgccggcccttcatgacgctgcccatggacacaaccatatccattaataacacggtcattacccccatgctgaaccccatcatctattccctgaggaacaaagaagttaaaaaggccataaagaggttgttcaagagaaagtgctgcaggagaaggtgagcggccgc

SEQ ID NO: 478 - DNA, 1103 bp, synthetic construct
  source 1..1103: mol_type = other DNA; note = mmLucy-FLAG-rho-OR4D9
ggatccgccaccatgagccaccagatcctgctgctcctggccctgctgaccctaggcctggctgattacaaggacgacgacgataagatcgaattgatgaacgggaccgagggcccaaacttctacgtgcctttctccaacaagacgggcgtggtggaattcatggatcagagaaattacaccagagtgaaagaatttaccttcctgggaattactcagtcccgagaactgagccaggtcttatttaccttcctgtttttggtgtacatgacaactctaatgggaaacttcctcatcatggttacagttacctgtgaatctcaccttcatacgcccatgtacttcctgctccgcaacctgtctattcttgacatctgcttttcctccatcacagctcctaaggtcctgatagatcttctatcagagacaaaaaccatctccttcagtggctgtgtcactcaaatgttcttcttccaccttctggggggagcagacgttttttctctctctgtgatggcgtttgaccgctatatagccatctccaagcccctgcactatatgaccatcatgagtagggggcgatgcacaggcctcatcgtggcttcctgggtggggggctttgtccactccatagcgcagatttctctattgctcccactccctttctgtggacccaatgttcttgacactttctactgcgatgtcccccaggtcctcaaacttgcctgcactgacaccttcactctggagctcctgatgatttcaaataatgggttagtcagttggtttgtattcttctttctcctcatatcttacacggtcatcttgatgatgctgaggtctcacactggggaaggcaggaggaaagccatctccacctgcacctcccacatcaccgtggtgaccctgcatttcgtgccctgcatctatgtctatgcccggcccttcactgccctccccacagacactgccatctctgtcaccttcactgtcatctcccctttgctcaatcctataatttacacgctgaggaacaaagaagttaaaaaggccataaagaggttgttcaagagaaagtgctgcaggagaaggtgagcggccgc

SEQ ID NO: 479 - DNA, 1103 bp, synthetic construct
  source 1..1103: mol_type = other DNA; note = mmLucy-FLAG-rho-OR4E2
ggatccgccaccatgagccaccagatcctgctgctcctggccctgctgaccctaggcctggctgattacaaggacgacgacgataagatcgaattgatgaacgggaccgagggcccaaacttctacgtgcctttctccaacaagacgggcgtggtggaattcatggacagtctaaaccaaacaagagtgactgaatttgtcttcttgggactcactgataaccgggtgctggaaatgctgtttttcatggcattctcagccatttatatgctaacgctttcagggaacattctcatcatcattgccacagtctttactccaagtctccatacccccatgtatttcttcctgagcaatctgtcctttattgacatctgccactcatctgtcactgtgcctaagatgttggagggtttgcttttagaaagaaagaccatttcctttgacaactgcatcacacagctcttcttcctacatctctttgcctgtgccgagatctttctgctgatcattgtggcgtatgatcgttacgtggctatctgcactccactccactaccccaatgtgatgaacatgagagtctgtatacagcttgtctttgctctctggttggggggtactgttcactcactagggcagaccttcttgactattcgtctaccttactgtggccccaacattattgacagctacttctgtgatgtgcctcttgttatcaagctggcctgcacagatacatacctcacaggaatactgattgtgaccaatagtggaaccatctccctctcctgtttcttggccgtggtcacctcctatatggtcatcctggtttctcttcgaaaacactcagctgaagggcgccagaaagccctgtctacctgctcggcccacttcatggtggttgccctcttctttgggccatgtatcttcatctatactcggccagacaccagcttctccattgacaaggtggtgtctgtcttctacacagtggtcacccctttgctgaatcccttcatttacaccttgaggaacaaagaagttaaaaaggccataaagaggttgttcaagagaaagtgctgcaggagaaggtgagcggccgc

SEQ ID NO: 480 - DNA, 1103 bp, synthetic construct
  source 1..1103: mol_type = other DNA; note = mmLucy-FLAG-rho-OR4E2(V118M,Q234R)
ggatccgccaccatgagccaccagatcctgctgctcctggccctgctgaccctaggcctggctgattacaaggacgacgacgataagatcgaattgatgaacgggaccgagggcccaaacttctacgtgcctttctccaacaagacgggcgtggtggaattcatggacagtctaaaccaaacaagagtgactgaatttgtcttcttgggactcactgataaccgggtgctggaaatgctgtttttcatggcattctcagccatttatatgctaacgctttcagggaacattctcatcatcattgccacagtctttactccaagtctccatacccccatgtatttcttcctgagcaatctgtcctttattgacatctgccactcatctgtcactgtgcctaagatgttggagggtttgcttttagaaagaaagaccatttcctttgacaactgcatcacacagctcttcttcctacatctctttgcctgtgccgagatctttctgctgatcattatggcgtatgatcgttacgtggctatctgcactccactccactaccccaatgtgatgaacatgagagtctgtatacagcttgtctttgctctctggttggggggtactgttcactcactagggcagaccttcttgactattcgtctaccttactgtggccccaacattattgacagctacttctgtgatgtgcctcttgttatcaagctggcctgcacagatacatacctcacaggaatactgattgtgaccaatagtggaaccatctccctctcctgtttcttggccgtggtcacctcctatatggtcatcctggtttctcttcgaaaacactcagctgaagggcgccggaaagccctgtctacctgctcggcccacttcatggtggttgccctcttctttgggccatgtatcttcatctatactcggccagacaccagcttctccattgacaaggtggtgtctgtcttctacacagtggtcacccctttgctgaatcccttcatttacaccttgaggaacaaagaagttaaaaaggccataaagaggttgttcaagagaaagtgctgcaggagaaggtgagcggccgc

SEQ ID NO: 481 - DNA, 1103 bp, synthetic construct
  source 1..1103: mol_type = other DNA; note = mmLucy-FLAG-rho-OR4F15
ggatccgccaccatgagccaccagatcctgctgctcctggccctgctgaccctaggcctggctgattacaaggacgacgacgataagatcgaattgatgaacgggaccgagggcccaaacttctacgtgcctttctccaacaagacgggcgtggtggaattcatgaatggaatgaatcactctgtggtatcagaatttgtattcatgggactcaccaactcacgggagattcagcttctactttttgttttctctttgttgttctactttgcgagcatgatgggaaaccttgtcattgtattcactgtaaccatggatgctcatctgcactcccccatgtatttcctcctggctaacctctcaatcattgatatggcattttgctcaattacagcccctaagatgatttgtgatattttcaagaagcacaaggccatctcctttcggggatgtattactcagatcttctttagccatgctcttgggggcactgagatggtgctgctcatagccatggcctttgacagatacatggccatatgtaaacctctccactacctgaccatcatgagcccaagaatgtgtctatactttttagccacttcctctatcattggccttatccactcattggtccaattagtttttgtggtagatttacctttttgtggtcctaatatctttgacagtttttactgtgatctccctcggctcctcagacttgcctgtaccaacacccaagaactggagttcatggtcactgtcaatagtggactcatttctgtgggctcctttgtcttgctggtaatttcctacatcttcattctgttcactgtttggaaacattcttctggtggtctagccaaggccctctctaccctgtcagctcatgtcactgtggtcatcttgttctttgggccactgatgtttttctacacatggccttctcccacatcacacctggataaatatcttgctatttttgatgcatttattactccttttctgaatccagttatctacacattcaggaacaaagaagttaaaaaggccataaagaggttgttcaagagaaagtgctgcaggagaaggtgagcggccgc

SEQ ID NO: 482 - DNA, 1103 bp, synthetic construct
  source 1..1103: mol_type = other DNA; note = mmLucy-FLAG-rho-OR4F16
ggatccgccaccatgagccaccagatcctgctgctcctggccctgctgaccctaggcctggctgattacaaggacgacgacgataagatcgaattgatgaacgggaccgagggcccaaacttctacgtgcctttctccaacaagacgggcgtggtggaattcatggatggagagaatcactcagtggtatctgagtttttgtttctgggactcactcattcatgggagatccagctcctcctcctagtgttttcctctgtgctctatgtggcaagcattactggaaacatcctcattgtgttttctgtgaccactgaccctcacttacactcccccatgtactttctactggccagtctctccttcattgacttaggagcctgctctgtcacttctcccaagatgatttatgacctgttcagaaagcgcaaagtcatctcctttggaggctgcatcgctcaaatcttcttcatccacgtcgttggtggtgtggagatggtgctgctcatagccatggcctttgacagatatgtggccctatgtaagcccctccactatctgaccattatgagcccaagaatgtgcctttcatttctggctgttgcctggacccttggtgtcagtcactccctgttccaactggcatttcttgttaatttagccttctgtggccctaatgtgttggacagcttctactgtgaccttcctcggcttctcagactagcctgtaccgacacctacagattgcagttcatggtcactgttaacagtgggtttatctgtgtgggtactttcttcatacttctaatctcctacgtcttcatcctgtttactgtttggaaacattcctcaggtggttcatccaaggccctttccactctttcagctcacagcacagtggtccttttgttctttggtccacccatgtttgtgtatacacggccacaccctaattcacagatggacaagtttctggctatttttgatgcagttctcactccttttctgaatccagttgtctatacattcaggaacaaagaagttaaaaaggccataaagaggttgttcaagagaaagtgctgcaggagaaggtgagcggccgc

SEQ ID NO: 483 - DNA, 1082 bp, synthetic construct
  source 1..1082: mol_type = other DNA; note = mmLucy-FLAG-rho-OR4F17
ggatccgccaccatgagccaccagatcctgctgctcctggccctgctgaccctaggcctggctgattacaaggacgacgacgataagatcgaattgatgaacgggaccgagggcccaaacttctacgtgcctttctccaacaagacgggcgtggtggaattcatggtgactgaattcatttttctgggtctctctgattctcagggactccagaccttcctatttatgttgttttttgtattctatggaggaatcgtgtttggaaaccttcttattgtcataacagtggtatctgactcccaccttcactctcccatgtacttcctgctagccaacctctcactcattgatctgtctctgtcttcagtcacagcccccaagatgattactgactttttcagccagcgcaaagtcatctctttcaagggctgccttgttcagatatttctccttcacttctttggtgggagtgagatggtgatcctcatagccatgggctttgacagatatatagcaatatgcaaacccctacactacactacaattatgtgtggcaacgcatgtgtcggcattatggctgtcgcatggggaattggctttctccattcggtgagccagttggcctttgccgtgcacttacccttctgtggtcccaatgaggtcgatagtttttattgtgaccttcctagggtaatcaaacttgcctgtacagatacctacaggctagatattatggtcattgctaacagtggtgtgctcactgtgtgttcttttgttcttctaatcatctcatacactatcatcctaatgaccatccagcatcgccctttagataagtcgtccaaagctctgtccactttgactgctcacattacagtagttcttttgttctttggaccatgtgtctttatttatgcctggccattccccatcaagtcattagataaattccttgctgtattttattctgtgatcacccctctcttgaacccaattatatacacactgaggaacaaagaagttaaaaaggccataaagaggttgttcaagagaaagtgctgcaggagaaggtgagcggccgc

SEQ ID NO: 484 - DNA, 1103 bp, synthetic construct
  source 1..1103: mol_type = other DNA; note = mmLucy-FLAG-rho-OR4F21
ggatccgccaccatgagccaccagatcctgctgctcctggccctgctgaccctaggcctggctgattacaaggacgacgacgataagatcgaattgatgaacgggaccgagggcccaaacttctacgtgcctttctccaacaagacgggcgtggtggaattcatggatggagagaatcactcagtggtatctgagtttttgtttctgggactcactcattcatgggagatccagctcctcctcctagtgttttcctctgtgctctatgtggcaagcattactggaaacatcttcattgtgttttctgtgaccactgaccctcacttacactcccccatgtactttctactggccagtctctccttcattgacttaggagcctgctctgtcacttctcccaagatgatttatgacctgttcagaaagcgcaaagtcatctcctttggaggctgcatcgctcaaatcttcttcatccacgtcattggtggtgtggagatggtgctgctcatagccatggcctttgacagatatgtggccctatgtaagcccctccactatctgaccattatgagcccaagaatgtgcctttcatttctggctgttgcctggacccttggtgtcagtcactccctgttccaactggcatttcttgttaatttagccttctgtggccctaatgtgttggacagcttctactgtgaccttcctcggcttctcagactagcctgtaccgacacctacagattgcagttcatggtcactgttaacagtgggtttatctgtgtgggtactttcttcatacttctaatctcctacgtcttcatcctgtttactgtttggaaacattcctcaggtggttcatccaaggccctttccactctttcagctcacagcacagtggtccttttgttctttggtccacccatgtttgtgtatacacggccacaccctaattcacagatggacaagtttctggctatttttgatgcagttctcactccttttctgaatccagttgtctatacattcaggaacaaagaagttaaaaaggccataaagaggttgttcaagagaaagtgctgcaggagaaggtgagcggccgc

SEQ ID NO: 485 - DNA, 1103 bp, synthetic construct; identical to SEQ ID NO: 482
  source 1..1103: mol_type = other DNA; note = mmLucy-FLAG-rho-OR4F29

SEQ ID NO: 486 - DNA, 1103 bp, synthetic construct; identical to SEQ ID NO: 482
  source 1..1103: mol_type = other DNA; note = mmLucy-FLAG-rho-OR4F3

SEQ ID NO: 487 - DNA, 1082 bp, synthetic construct
  source 1..1082: mol_type = other DNA; note = mmLucy-FLAG-rho-OR4F4
ggatccgccaccatgagccaccagatcctgctgctcctggccctgctgaccctaggcctggctgattacaaggacgacgacgataagatcgaattgatgaacgggaccgagggcccaaacttctacgtgcctttctccaacaagacgggcgtggtggaattcatggtgactgaattcatttttctgggtctctctgattctcaggaactccagaccttcctatttatgttgttttttgtattctatggaggaatcgtgtttggaaaccttcttattgtcataacagtggtatctgactcccaccttcactctcccatgtacttcctgctagccaacctctcactcattgatctgtctctgtcttcagtcacagcccccaagatgattactgactttttcagccagcgcaaagtcatctctttcaagggctgccttgttcagatatttctccttcacttctttggtgggagtgagatggtgatcctcatagccatgggctttgacagatatatagcaatatgcaaacccctacactacactacaattatgtgtggcaacgcatgtgtcggcattatggctgtcgcatggggaattggctttctccattcggtgagccagttggcctttgccgtgcacttacccttctgtggtcccaatgaggtcgatagtttttattgtgaccttcctagggtaatcaaacttgcctgtacagatacctacaggctagatattatggtcattgctaacagtggtgtgctcactgtgtgttcttttgttcttctaatcatctcatacactatcatcctaatgaccatccagcattgccctttagataagtcgtccaaagctctgtccactttgactgctcacattacagtagttcttttgttctttggaccatgtgtctttatttatgcctggccattccccatcaagtcattagataaattccttgctgtattttattctgtgatcacccctctcttgaacccaattatatacacactgaggaacaaagaagttaaaaaggccataaagaggttgttcaagagaaagtgctgcaggagaaggtgagcggccgc

SEQ ID NO: 488 - DNA, 1082 bp, synthetic construct
  source 1..1082: mol_type = other DNA; note = mmLucy-FLAG-rho-OR4F5
ggatccgccaccatgagccaccagatcctgctgctcctggccctgctgaccctaggcctggctgattacaaggacgacgacgataagatcgaattgatgaacgggaccgagggcccaaacttctacgtgcctttctccaacaagacgggcgtggtggaattcatggtgactgaattcatttttctgggtctctctgattctcaggaactccagaccttcctatttatgttgttttttgtattctatggaggaatcgtgtttggaaaccttcttattgtcataacagtggtatctgactcccaccttcactctcccatgtacttcctgctagccaacctctcactcattgatctgtctctgtcttcagtcacagcccccaagatgattactgactttttcagccagcgcaaagtcatctctttcaagggctgccttgttcagatatttctccttcacttctttggtgggagtgagatggtgatcctcatagccatgggctttgacagatatatagcaatatgcaagcccctacactacactacaattatgtgtggcaacgcatgtgtcggcattatggctgtcacatggggaattggctttctccattcggtgagccagttggcgtttgccgtgcacttactcttctgtggtcccaatgaggtcgatagtttttattgtgaccttcctagggtaatcaaacttgcctgtacagatacctacaggctagatattatggtcattgctaacagtggtgtgctcactgtgtgttcttttgttcttctaatcatctcatacactatcatcctaatgaccatccagcatcgccctttagataagtcgtccaaagctctgtccactttgactgctcacattacagtagttcttttgttctttggaccatgtgtctttatttatgcctggccattccccatcaagtcattagataaattccttgctgtattttattctgtgatcacccctctcttgaacccaattatatacacactgaggaacaaagaagttaaaaaggccataaagaggttgttcaagagaaagtgctgcaggagaaggtgagcggccgc

SEQ ID NO: 489 - DNA, 1103 bp, synthetic construct
  source 1..1103: mol_type = other DNA; note = mmLucy-FLAG-rho-OR4F6
ggatccgccaccatgagccaccagatcctgctgctcctggccctgctgaccctaggcctggctgattacaaggacgacgacgataagatcgaattgatgaacgggaccgagggcccaaacttctacgtgcctttctccaacaagacgggcgtggtggaattcatggatgaagccaatcactctgtggtctctgagtttgtgttcctgggactctctgactcgcggaagatccagctcctcctcttcctctttttctcagtgttctatgtgtcaagcctgatgggaaatctcctcattgtgctaactgtgacctctgaccctcgtttacagtcccccatgtacttcctgctggccaacctttccatcatcaatttggtattttgttcctccacagctcccaagatgatttatgaccttttcaggaagcacaagaccatctcttttgggggctgtgtagttcagatcttctttatccatgcagttgggggaactgagatggtgctgctcatagccatggcttttgaccgatatgtggccatatgtaagcctctccactacctgaccatcatgaacccacaaaggtgcattttgtttttagtcatttcctggattataggtattattcactcagtgattcagttggcttttgttgtagacctgctgttctgtggccctaatgaattagatagtttcttttgtgatcttcctcgatttatcaaactggcttgcatagagacctacacattgggattcatggttactgccaatagtggatttatttctctggcttcttttttaattctcataatctcttacatctttattttggtgactgttcagaaaaaatcttcaggtggtatattcaaggctttctctatgctgtcagctcatgtcattgtggtggttttggtctttgggccattaatctttttctatatttttccatttcccacatcacatcttgataaattccttgccatctttgatgcagttatcactcccgttttgaatccagtcatctatacttttaggaacaaagaagttaaaaaggccataaagaggttgttcaagagaaagtgctgcaggagaaggtgagcggccgc

SEQ ID NO: 490 - DNA, 1103 bp, synthetic construct
  source 1..1103: mol_type = other DNA; note = mmLucy-FLAG-rho-OR4K1
ggatccgccaccatgagccaccagatcctgctgctcctggccctgctgaccctaggcctggctgattacaaggacgacgacgataagatcgaattgatgaacgggaccgagggcccaaacttctacgtgcctttctccaacaagacgggcgtggtggaattcatggctcacacaaatgaatcgatggtgtctgagtttgtacttttgggactctctaattcctggggacttcaacttttcttttttgccatcttctctatagtctatgtgacatcagtgctaggcaatgtcttaattattgtcattatttcttttgactcccatttgaactctcctatgtacttcttgctcagtaatctttctttcattgatatctgtcagtctaactttgccacccccaagatgcttgtagacttttttattgagcgcaagactatctcctttgagggttgcatggcccagatattcgttcttcacagttttgttgggagtgagatgatgttgcttgtagctatggcatatgacagatttatagccatatgtaagcctctgcactacagtacaattatgaaccggaggctctgtgtaatttttgtgtctatttcctgggcggtgggcgttcttcattctgtgagccacttggcttttacagtggacctgccattctgtggtcccaatgaggtggatagcttcttttgtgaccttcccttggtgatagagctggcttgcatggatacatatgaaatggaaattatgaccctaacgaacagtggcctgatatcattgagctgtttcctggctttaattatttcctacaccatcattttgatcggtgtccgatgcaggtcctccagtgggtcatctaaggctctttctacattaactgcccacatcacagtggtcattcttttcttcgggccttgcatttatttctatatatggccttttagcagacttcctgtggacaaatttctttctgtgttctacactgtttgtactcccttgttgaaccccatcatctactctctgaggaacaaagaagttaaaaaggccataaagaggttgttcaagagaaagtgctgcaggagaaggtgagcggccgc

SEQ ID NO: 491 - DNA, 1103 bp, synthetic construct
  source 1..1103: mol_type = other DNA; note = mmLucy-FLAG-rho-OR4K13
ggatccgccaccatgagccaccagatcctgctgctcctggccctgctgaccctaggcctggctgattacaaggacgacgacgataagatcgaattgatgaacgggaccgagggcccaaacttctacgtgcctttctccaacaagacgggcgtggtggaattcatggaaagagcaaaccattcagtggtatcggaatttattttgttgggactttccaaatctcaaaatcttcagattttattcttcttgggattctctgtggtcttcgtggggattgtgttaggaaacctgctcatcttggtgactgtgacctttgattcgctccttcacacaccaatgtattttctgcttagcaacctctcctgcattgatatgatcctggcttcttttgctacccctaagatgattgtagatttcctccgagaacgtaagaccatctcatggtggggatgttattcccagatgttctttatgcacctcctgggtgggagtgagatgatgttgcttgtagccatggcaatagacaggtatgttgccatatgcaaacccctccattacatgaccatcatgagcccacgggtgctcactgggctactgttatcctcctatgcagttggatttgtgcactcatctagtcaaatggctttcatgttgactttgcccttctgtggtcccaatgttatagacagctttttctgtgaccttccccttgtgattaaacttgcctgcaaggacacctacatcctacagctcctggtcattgctgacagtgggctcctgtcactggtctgcttcctcctcttgcttgtctcctatggagtcataatattctcagttaggtaccgtgctgctagtcgatcctctaaggctttctccactctctcagctcacatcacagttgtgactctgttctttgctccgtgtgtctttatctacgtctggcccttcagcagatactcggtagataaaattctttctgtgttttacacaattttcacacctctcttaaatcctattatttatacattaaggaacaaagaagttaaaaaggccataaagaggttgttcaagagaaagtgctgcaggagaaggtgagcggccgc

SEQ ID NO: 492 - DNA, 1106 bp, synthetic construct
  source 1..1106: mol_type = other DNA; note = mmLucy-FLAG-rho-OR4K14
ggatccgccaccatgagccaccagatcctgctgctcctggccctgctgaccctaggcctggctgattacaaggacgacgacgataagatcgaattgatgaacgggaccgagggcccaaacttctacgtgcctttctccaacaagacgggcgtggtggaattcatggacccacagaactattccttggtgtcagaatttgtgttgcatggactctgcacttcacgacatcttcaaaattttttctttatatttttctttggggtctatgtggccattatgctgggtaaccttctcattttggtcactgtaatttctgatccctgcctgcactcctcccctatgtacttcctgctggggaacctagctttcctggacatgtggctggcctcatttgccactcccaagatgatcagggatttccttagtgatcaaaaactcatctcctttggaggatgtatggctcaaatcttcttcttgcactttactggtggggctgagatggtgctcctggtttccatggcctatgacagatatgtggccatatgcaaacccttgcattacatgactttgatgagttggcagacttgcatcaggctggtgctggcttcatgggtcgttggatttgtgcactccatcagtcaagtggctttcactgtaaatttgccttactgtggccccaatgaggtagacagcttcttctgtgacctccctctggtgatcaaacttgcctgcatggacacctatgtcttgggtataattatgatctcagacagtgggttgctttccttgagctgttttctgctcctcctgatctcctacaccgtgatcctcctcgctatcagacagcgtgctgccggtagcacatccaaagcactctccacttgctctgcacatatcatggtagtgacgctgttctttggcccttgcatttttgtttatgtgcggcctttcagtaggttctctgtggacaagctgctgtctgtgttttataccatttttactccactcctgaaccccattatctacacattgaggaacaaagaagttaaaaaggccataaagaggttgttcaagagaaagtgctgcaggagaaggtgagcggccgc

SEQ ID NO: 493 - DNA, 1103 bp, synthetic construct
  source 1..1103: mol_type = other DNA; note = mmLucy-FLAG-rho-OR4K15
ggatccgccaccatgagccaccagatcctgctgctcctggccctgctgaccctaggcctggctgattacaaggacgacgacgataagatcgaattgatgaacgggaccgagggcccaaacttctacgtgcctttctccaacaagacgggcgtggtggaattcatgaatgagacaaatcattctcgggtgacagaatttgtgttgctgggactgtctagttcaagggagctccaacctttcttgtttcttacattttcactactttatctagcaattctgttgggcaactttctcatcatcctcactgtgacctcagattcccgccttcacacccccatgtactttctgcttgcaaacctgtcatttatagacgtatgtgttgcctcttttgctacccctaaaatgattgcagactttctggttgagcgcaagactatttcttttgatgcctgcctggcccagattttctttgttcatctcttcactggcagtgaaatggtgctcctagtttccatggcctatgaccgttatgttgctatatgcaaacctctccactacatgacagtcatgagccgtcgtgtatgtgttgtgctcgtcctcatttcatggtttgtgggcttcatccatactaccagccagttggcattcactgttaatctgccattttgtggtcctaataaggtagacagttttttctgtgaccttcctctagtgaccaagttagcctgcatagacacttatgttgtcagcttactaatagttgcagatagtggctttctttctctgagttcctttctcctcttggttgtctcctacactgtaatacttgttacagttaggaatcgctcctctgcaagcatggcgaaggcccgctccacattgactgctcacatcactgtggtcactttattctttggaccatgcattttcatctatgtgtggcccttcagcagttactcagttgacaaagtccttgctgtattctacaccatcttcacgcttattttaaaccctgtaatctacacgctaaggaacaaagaagttaaaaaggccataaagaggttgttcaagagaaagtgctgcaggagaaggtgagcggccgc

SEQ ID NO: 494 - DNA, 1103 bp, synthetic construct
  source 1..1103: mol_type = other DNA; note = mmLucy-FLAG-rho-OR4K17
ggatccgccaccatgagccaccagatcctgctgctcctggccctgctgaccctaggcctggctgattacaaggacgacgacgataagatcgaattgatgaacgggaccgagggcccaaacttctacgtgcctttctccaacaagacgggcgtggtggaattcatgaaactattaaatcaatctcaagtgtcagaattcattttgctgggactgaccagctcccaggatgtagagtttcttctctttgccctcttctcggttatctatgtggtcacagttttgggtaaccttcttattatagtcacagtgtttaacacccctaacctgaatactcccatgtattttctccttggtaatctctcttttgtagatatgacccttgcttcttttgccacccctaaggtgattctgaacttgttaaaaaagcagaaggtaatttcttttgctgggtgcttcactcagatatttctccttcacttactgggtggggttgaaatggtactgttggtctccatggcttttgacagatatgtggccatttgtaagcccctacactacatgaccatcatgaacaagaaggtatgtgttttgcttgtagtgacctcatggctcttgggtctccttcactcagggtttcagataccatttgctgtgaacttgcccttttgtggtcccaatgtggtagacagcattttttgtgacctccctttggttactaagcttgcctgtatagacatatattttgtacaggtagtcattgttgccaacagtggcataatctccctgagctgtttcattattttgcttatctcctacagtctgatcctcataaccattaagaaccactctcctactgggcaatctaaagcccgttccactttgactgctcacatcacagtggtgattctcttctttggcccatgcatctttatctacatttggcccttcggcaaccactctgtagataagttccttgctgtgttttataccatcatcactcctatcttgaatccaattatctatactctgaggaacaaagaagttaaaaaggccataaagaggttgttcaagagaaagtgctgcaggagaaggtgagcggccgc

SEQ ID NO: 495 - DNA, 1103 bp, synthetic construct
  source 1..1103: mol_type = other DNA; note = mmLucy-FLAG-rho-OR4K17(K128N)
ggatccgccaccatgagccaccagatcctgctgctcctggccctgctgaccctaggcctggctgattacaaggacgacgacgataagatcgaattgatgaacgggaccgagggcccaaacttctacgtgcctttctccaacaagacgggcgtggtggaattcatgaaactattaaatcaatctcaagtgtcagaattcattttgctgggactgaccagctcccaggatgtagagtttcttctctttgccctcttctcggttatctatgtggtcacagttttgggtaaccttcttattatagtcacagtgtttaacacccctaacctgaatactcccatgtattttctccttggtaatctctcttttgtagatatgacccttgcttcttttgccacccctaaggtgattctgaacttgttaaaaaagcagaaggtaatttcttttgctgggtgcttcactcagatatttctccttcacttactgggtggggttgaaatggtactgttggtctccatggcttttgacagatatgtggccatttgtaaccccctacactacatgaccatcatgaacaagaaggtatgtgttttgcttgtagtgacctcatggctcttgggtctccttcactcagggtttcagataccatttgctgtgaacttgcccttttgtggtcccaatgtggtagacagcattttttgtgacctccctttggttactaagcttgcctgtatagacatatattttgtacaggtagtcattgttgccaacagtggcataatctccctgagctgtttcattattttgcttatctcctacagtctgatcctcataaccattaagaaccactctcctactgggcaatctaaagcccgttccactttgactgctcacatcacagtggtgattctcttctttggcccatgcatctttatctacatttggcccttcggcaaccactctgtagataagttccttgctgtgttttataccatcatcactcctatcttgaatccaattatctatactctgaggaacaaagaagttaaaaaggccataaagaggttgttcaagagaaagtgctgcaggagaaggtgagcggccgc

SEQ ID NO: 496 - DNA, 1103 bp, synthetic construct
  source 1..1103: mol_type = other DNA; note = mmLucy-FLAG-rho-OR4K2
ggatccgccaccatgagccaccagatcctgctgctcctggccctgctgaccctaggcctggctgattacaaggacgacgacgataagatcgaattgatgaacgggaccgagggcccaaacttctacgtgcctttctccaacaagacgggcgtggtggaattcatggatgtgggcaataagtctaccatgtctgaatttgttttgctggggctctctaattcctgggaactacagatgtttttctttatggtgttttcattgctttatgtggcaacaatggtgggtaacagcctcatagtcatcacagttatagtggaccctcacctacactctcctatgtatttcctgcttaccaatctttcaatcattgatatgtctcttgcttctttcgccaccccaaagatgattacagattacctaacaggtcacaaaaccatctcttttgatggctgccttacccagatattctttctccaccttttcactggaactgagatcatcttactcatggccatgtcctttgataggtatattgcaatatgcaagcccctgcactatgcttctgtcattagtccccaggtgtgtgttgctctcgtggtggcttcctggattatgggagttatgcattcaatgagtcaggtcatatttgccctcacgttaccattctgtggtccctatgaggtagacagctttttctgtgaccttcctgtggtgttccagttggcttgtgtggatacttatgttctgggcctctttatgatctcaacaagtggcataattgcgttgtcctgttttattgttttatttaattcatatgttattgtcctggttactgtgaagcatcattcttccagaggatcatctaaggccctttctacttgtacagctcatttcattgttgtcttcttgttctttgggccatgcatcttcatctacatgtggccactaagcagctttctcacagacaagattctgtctgtgttttataccatctttactcccactctgaacccaataatctatactttgaggaacaaagaagttaaaaaggccataaagaggttgttcaagagaaagtgctgcaggagaaggtgagcggccgc

SEQ ID NO: 497 - DNA, 1103 bp, synthetic construct
  source 1..1103: mol_type = other DNA; note = mmLucy-FLAG-rho-OR4K5
ggatccgccaccatgagccaccagatcctgctgctcctggccctgctgaccctaggcctggctgattacaaggacgacgacgataagatcgaattgatgaacgggaccgagggcccaaacttctacgtgcctttctccaacaagacgggcgtggtggaattcatggataagtccaattcttcagtggtgtctgaatttgtactgttgggactctgtagttctcaaaaactccagcttttctatttttgtttcttctctgtgttgtatacagtcattgtgctgggaaatcttctcattatcctcacagtgacttctgataccagcctgcactcccctatgtactttctcttgggaaacctttcctttgttgacatttgtcaggcttcttttgctacccctaaaatgattgcagattttctgagtgcacacgagaccatatctttcagtggctgcatagcccaaattttctttattcacctttttactggaggggagatggtgctacttgtttcgatggcctatgacaggtatgtagccatatgcaaacccttatactatgtggtcatcatgagccgaaggacatgcactgtcttggtaatgatctcctgggctgtgagcttggtgcacacattaagccagttatcatttactgtgaacctgcctttttgtggacctaatgtagtagacagctttttttgtgatcttcctcgagtcaccaaacttgcctgcctggactcttacatcattgaaatactaattgtggtcaatagtggaattctttccctaagcactttctctctcttggtcagctcctacatcattattcttgttacagtttggctcaagtcttcagctgcaatggcaaaggcattttctacgctggcttcccatattgcagtagtaatattattctttggaccttgcatcttcatctatgtgtggccctttaccatctctcctttggataaatttcttgccatattttacactgttttcacccccgtcctaaaccccattatttatacactaaggaacaaagaagttaaaaaggccataaagaggttgttcaagagaaagtgctgcaggagaaggtgagcggccgc

SEQ ID NO: 498 - DNA, 1103 bp, synthetic construct
  source 1..1103: mol_type = other DNA; note = mmLucy-FLAG-rho-OR4L1(R52S)
ggatccgccaccatgagccaccagatcctgctgctcctggccctgctgaccctaggcctggctgattacaaggacgacgacgataagatcgaattgatgaacgggaccgagggcccaaacttctacgtgcctttctccaacaagacgggcgtggtggaattcatggatcttaaaaatggatctctagtgaccgagtttattttactaggattttttggacgatgggaacttcaaattttcttctttgtgacattttccctgatctacggtgctactgtgatgggaaacattctcattatggtcacagtgacatgtagttcaacccttcattctcccttgtactttctccttggaaatctctcttttttggacatgtgtctctccactgccacaacacccaagatgatcatagatttgctcactgaccacaagaccatctctgtgtggggctgcgtgacccagatgttcttcatgcacttctttgggggtgctgagatgactcttctgataatcatggcctttgacaggtatgtagccatatgtaaacccctgcactataggacaatcatgagccacaagctgctaaaggggtttgcgatactttcatggataattggttttttacactccataagccagatagttttaacaatgaacttgcctttctgtggccacaatgtcataaacaacatattttgtgatcttccccttgtgatcaagcttgcttgcattgaaacatacaccctggaattatttgtcattgctgacagcgggctgctctctttcacctgtttcatcctcttgcttgtttcttacattgtcatcctggtcagtgtaccaaaaaaatcatcacatgggctctccaaggcgctgtccacattgtctgcccacatcattgtggtcactctgttctttggaccttgtatttttatctatgtttggccattcagtagtttggcaagcaataaaactcttgccgtattttatacagttatcacacccttactgaatccgagtatttataccctgaggaacaaagaagttaaaaaggccataaagaggttgttcaagagaaagtgctgcaggagaaggtgagcggccgc

SEQ ID NO: 499 - DNA, 1103 bp, synthetic construct
  source 1..1103: mol_type = other DNA; note = mmLucy-FLAG-rho-OR4L1(D2N,M40V,R52S,M101K,G109S)
ggatccgccaccatgagccaccagatcctgctgctcctggccctgctgaccctaggcctggctgattacaaggacgacgacgataagatcgaattgatgaacgggaccgagggcccaaacttctacgtgcctttctccaacaagacgggcgtggtggaattcatgaatcttaaaaatggatctctagtgaccgagtttattttactaggattttttggacgatgggaacttcaaattttcttctttgtgacattttccctgatctacggtgctactgtggtgggaaacattctcattatggtcacagtgacatgtagttcaacccttcattctcccttgtactttctccttggaaatctctcttttttggacatgtgtctctccactgccacaacacccaagatgatcatagatttgctcactgaccacaagaccatctctgtgtggggctgcgtgacccagaagttcttcatgcacttctttgggagtgctgagatgactcttctgataatcatggcctttgacaggtatgtagccatatgtaaacccctgcactataggacaatcatgagccacaagctgctaaaggggtttgcgatactttcatggataattggttttttacactccataagccagatagttttaacaatgaacttgcctttctgtggccacaatgtcataaacaacatattttgtgatcttccccttgtgatcaagcttgcttgcattgaaacatacaccctggaattatttgtcattgctgacagcgggctgctctctttcacctgtttcatcctcttgcttgtttcttacattgtcatcctggtcagtgtaccaaaaaaatcatcacatgggctctccaaggcgctgtccacattgtctgcccacatcattgtggtcactctgttctttggaccttgtatttttatctatgtttggccattcagtagtttggcaagcaataaaactcttgccgtattttatacagttatcacacccttactgaatccgagtatttataccctgaggaacaaagaagttaaaaaggccataaagaggttgttcaagagaaagtgctgcaggagaaggtgagcggccgc

SEQ ID NO: 500 - DNA, 1109 bp, synthetic construct
  source 1..1109: mol_type = other DNA; note = mmLucy-FLAG-rho-OR4M1
ggatccgccaccatgagccaccagatcctgctgctcctggccctgctgaccctaggcctggctgattacaaggacgacgacgataagatcgaattgatgaacgggaccgagggcccaaacttctacgtgcctttctccaacaagacgggcgtggtggaattcatggaaactgcaaattacaccaaggtgacagaatttgttctcactggcctatcccagactcgggaggtccaactagtcctatttgttatatttctatccttctatttgttcatcctaccaggaaatatccttatcatttgcaccatcaggctagaccctcatctgacttctcctatgtatttcctgttggctaatctggccctccttgatatttggtactcttccattacagcccctaaaatgctcatagacttctttgtggagaggaagataatttcctttggtggatgcattgcacagctcttcttcttacactttgttggggcttcggagatgttcttgctcacagtgatggcctatgaccgctatgctgctatctgccgacccctccactatgctaccatcatgaatcgacgtctctgctgtatcctggtggctctctcctggatggggggcttcattcattctataatacaggtggctctcattgttcgacttcctttctgtgggcccaatgagttagacagttacttctgtgacatcacacaggttgtccggattgcctgtgccaacaccttcccagaggagttagtgatgatctgtagtagtggtctgatctctgtggtgtgtttcattgctctgttaatgtcctatgccttccttctggccttgctcaagaaacattcaggctcaggtgagaataccaacagggccatgtccacctgctattcccacattaccattgtggtgctaatgtttgggccatccatctacatttatgctcgcccatttgactcattttccctagataaagtggtgtctgtgtttcatactgtaatattccctttacttaatcccattatttacacattgaggaacaaagaagttaaaaaggccataaagaggttgttcaagagaaagtgctgcaggagaaggtgagcggccgc

SEQ ID NO: 501 - DNA, 1109 bp, synthetic construct
  source 1..1109: mol_type = other DNA; note = mmLucy-FLAG-rho-OR4M2
ggatccgccaccatgagccaccagatcctgctgctcctggccctgctgaccctaggcctggctgattacaaggacgacgacgataagatcgaattgatgaacgggaccgagggcccaaacttctacgtgcctttctccaacaagacgggcgtggtggaattcatggaaactgcaaattacaccaaggtgacagaatttgttctcactggcctatcccagactccagaggtccaactagtcctatttgttatatttctatccttctatttgttcatcctaccaggaaatatccttatcatttgcaccatcagtctagaccctcatctgacctctcctatgtatttcctgttggctaatctggccttccttgatatttggtactcttccattacagcccctgaaatgctcatagacttctttgtggagaggaagataatttcttttgatggatgcattgcacagctcttcttcttacactttgctggggcttcggagatgttcttgctcacagtgatggcctttgacctctacactgctatctgccgacccctccactatgctaccatcatgaatcaacgtctctgctgtatcctggtggctctctcctggagggggggcttcattcattctatcatacaggtggctctcattgttcgacttcctttctgtgggcccaatgagttagacagttacttctgtgacatcacacaggttgtccggattgcctgtgccaacaccttcccagaggagttagtgatgatctgtagtagtggtctgatctctgtggtgtgtttgattgctctgttaatgtcctatgccttccttctggccttgttcaagaaactttcaggctcaggtgagaataccaacagggccatgtccacctgctattcccacattaccattgtggtgctaatgtttgggccatccatctacatttatgctcgcccatttgactcgttttccctagataaagtggtgtctgtgttcaatactttaatattccctttacgtaatcccattatttacacattgaggaacaaagaagttaaaaaggccataaagaggttgttcaagagaaagtgctgcaggagaaggtgagcggccgc

SEQ ID NO: 502 - DNA, 1109 bp, synthetic construct
  source 1..1109: mol_type = other DNA; note = mmLucy-FLAG-rho-OR4M2M239V,R284H)
ggatccgccaccatgagccaccagatcctgctgctcctggccctgctgaccctaggcctggctgattacaaggacgacgacgataagatcgaattgatgaacgggaccgagggcccaaacttctacgtgcctttctccaacaagacgggcgtggtggaattcatggaaactgcaaattacaccaaggtgacagaatttgttctcactggcctatcccagactccagaggtccaactagtcctatttgttatatttctatccttctatttgttcatcctaccaggaaatatccttatcatttgcaccatcagtctagaccctcatctgacctctcctatgtatttcctgttggctaatctggccttccttgatatttggtactcttccattacagcccctgaaatgctcatagacttctttgtggagaggaagataatttcttttgatggatgcattgcacagctcttcttcttacactttgctggggcttcggagatgttcttgctcacagtgatggcctttgacctctacactgctatctgccgacccctccactatgctaccatcatgaatcaacgtctctgctgtatcctggtggctctctcctggagggggggcttcattcattctatcatacaggtggctctcattgttcgacttcctttctgtgggcccaatgagttagacagttacttctgtgacatcacacaggttgtccggattgcctgtgccaacaccttcccagaggagttagtgatgatctgtagtagtggtctgatctctgtggtgtgtttgattgctctgttaatgtcctatgccttccttctggccttgttcaagaaactttcaggctcaggtgagaataccaacagggccgtgtccacctgctattcccacattaccattgtggtgctaatgtttgggccatccatctacatttatgctcgcccatttgactcgttttccctagataaagtggtgtctgtgttcaatactttaatattccctttacataatcccattatttacacattgaggaacaaagaagttaaaaaggccataaagaggttgttcaagagaaagtgctgcaggagaaggtgagcggccgc

SEQ ID NO: 503 - DNA, 1103 bp, synthetic construct
  source 1..1103: mol_type = other DNA; note = mmLucy-FLAG-rho-OR4N2
ggatccgccaccatgagccaccagatcctgctgctcctggccctgctgaccctaggcctggctgattacaaggacgacgacgataagatcgaattgatgaacgggaccgagggcccaaacttctacgtgcctttctccaacaagacgggcgtggtggaattcatggaaagcgagaacagaacagtgataagagaattcatcctccttggtctgacccagtctcaagatattcagctcctggtctttgtgctagttttaatattctacttcatcatcctccctggaaattttctcattattttcaccataaagtcagaccctgggctcacagcccccctctatttctttctgggcaacttggccttcctggatgcatcctactccttcattgtggctccccggatgttggtggacttcctctctgcgaagaagataatctcctacagaggctgcatcactcagctctttttcttgcacttccttggaggaggggagggattactccttgttgtgatggcctttgaccgctacatcgccatctgccggcctctgcactatcctactgtcatgaaccctagaacctgctatgcaatgatgttggctctgtggcttgggggttttgtccactccattatccaggtggtcctcatcctccgcttgcctttttgtggcccaaaccagctggacaacttcttctgtgatgtcccacaggtcatcaagctggcctgcaccgacacatttgtggtggagcttctgatggtcttcaacagtggcctgatgacactcctgtgctttctggggcttctggcctcctatgcagtcattctttgtcgcatacgagggtcttcttctgaggcaaaaaacaaggccatgtccacgtgcatcacccatatcattgttatattcttcatgtttggacctggcatcttcatctacacgcgccccttcagggctttcccagctgacaaggtggtttctctcttccacacagtgatttttcctttgttgaatcctgtcatttatacccttaggaacaaagaagttaaaaaggccataaagaggttgttcaagagaaagtgctgcaggagaaggtgagcggccgc

SEQ ID NO: 504 - DNA, 1103 bp, synthetic construct
  source 1..1103: mol_type = other DNA; note = mmLucy-FLAG-rho-OR4N2(I76T)
ggatccgccaccatgagccaccagatcctgctgctcctggccctgctgaccctaggcctggctgattacaaggacgacgacgataagatcgaattgatgaacgggaccgagggcccaaacttctacgtgcctttctccaacaagacgggcgtggtggaattcatggaaagcgagaacagaacagtgataagagaattcatcctccttggtctgacccagtctcaagatattcagctcctggtctttgtgctagttttaatattctacttcatcatcctccctggaaattttctcattattttcaccataaagtcagaccctgggctcacagcccccctctatttctttctgggcaacttggccttcctggatgcatcctactccttcactgtggctccccggatgttggtggacttcctctctgcgaagaagataatctcctacagaggctgcatcactcagctctttttcttgcacttccttggaggaggggagggattactccttgttgtgatggcctttgaccgctacatcgccatctgccggcctctgcactatcctactgtcatgaaccctagaacctgctatgcaatgatgttggctctgtggcttgggggttttgtccactccattatccaggtggtcctcatcctccgcttgcctttttgtggcccaaaccagctggacaacttcttctgtgatgtcccacaggtcatcaagctggcctgcaccgacacatttgtggtggagcttctgatggtcttcaacagtggcctgatgacactcctgtgctttctggggcttctggcctcctatgcagtcattctttgtcgcatacgagggtcttcttctgaggcaaaaaacaaggccatgtccacgtgcatcacccatatcattgttatattcttcatgtttggacctggcatcttcatctacacgcgccccttcagggctttcccagctgacaaggtggtttctctcttccacacagtgatttttcctttgttgaatcctgtcatttatacccttaggaacaaagaagttaaaaaggccataaagaggttgttcaagagaaagtgctgcaggagaaggtgagcggccgc

SEQ ID NO: 505 - DNA, 1103 bp, synthetic construct
  source 1..1103: mol_type = other DNA; note = mmLucy-FLAG-rho-OR4N4
ggatccgccaccatgagccaccagatcctgctgctcctggccctgctgaccctaggcctggctgattacaaggacgacgacgataagatcgaattgatgaacgggaccgagggcccaaacttctacgtgcctttctccaacaagacgggcgtggtggaattcatgaagatagcaaacaacacagtagtgacagaatttatcctccttggtctgactcagtctcaagatattcagctcttggtctttgtgctgatcttaattttctaccttatcatcctccctggaaattttctcattattttcaccataaggtcagaccctgggctcacagcccccctctatttatttctgggcaacttggccttcctggatgcatcctactccttcattgtggctcccaggatgttggtggacttcctctctgagaaaaaggtaatctcctacagaggctgcatcactcagctctttttcttgcacttccttggaggaggggagggattactccttgttgtgatggcctttgaccgctacatcgccatctgccggcctctgcactgttcaactgtcatgaaccctagagcctgctatgcaatgatgttggctctgtggcttgggggttttgtccactccattatccaggtggtcctcatcctccgcttgcctttttgtggcccaaaccagctggacaacttcttctgtgatgtccgacaggtcatcaagctggcttgcaccgacatgtttgtggtggagcttctaatggtcttcaacagtggcctgatgacactcctgtgctttctggggcttctggcttcctatgcagtcatcctctgccatgttcgtagggcagcttctgaagggaagaacaaggccatgtccacgtgcaccactcgtgtcattattatacttcttatgtttggacctgctatcttcatctacatgtgccctttcagggccttaccagctgacaagatggtttctctctttcacacagtgatctttccattgatgaatcctatgatttatacccttaggaacaaagaagttaaaaaggccataaagaggttgttcaagagaaagtgctgcaggagaaggtgagcggccgc

SEQ ID NO: 506 - DNA, 1103 bp, synthetic construct
  source 1..1103: mol_type = other DNA; note = mmLucy-FLAG-rho-OR4N5
ggatccgccaccatgagccaccagatcctgctgctcctggccctgctgaccctaggcctggctgattacaaggacgacgacgataagatcgaattgatgaacgggaccgagggcccaaacttctacgtgcctttctccaacaagacgggcgtggtggaattcatggaaacacagaacctcacagtggtgacagaattcattcttcttggtctgacccagtctcaagatgctcaacttctggtctttgtgctagtcttaattttctaccttatcatcctccctggaaatttcctcatcattttcaccataaagtcagaccctgggctcacagcccccctctatttctttctgggcaacttggccttactggatgcatcctactccttcattgtggttcccaggatgttggtggacttcctctctgagaagaaggtaatctcctatagaagctgcatcactcagctctttttcttgcattttcttggagcgggagagatgttcctcctcgttgtgatggcctttgaccgctacatcgccatctgccggcctttacactattcaaccatcatgaaccctagagcctgctatgcattatcgttggttctgtggcttgggggctttatccattccattgtacaagtagcccttatcctgcacttgcctttctgtggcccaaaccagctcgataacttcttctgtgatgttccacaggtcatcaagctggcctgcaccaatacctttgtggtggagcttctgatggtctccaacagtggcctgctcagcctcctgtgcttcctgggccttctggcctcctatgcagtcatcctctgtcgtataagggagcactcctctgaaggaaagagcaaggctatttccacatgcaccacccatattatcattatatttctcatgtttggacctgctattttcatctacacttgccccttccaggctttcccagctgacaaggtagtttctcttttccatactgtcatctttcctttgatgaaccctgttatttatacgcttaggaacaaagaagttaaaaaggccataaagaggttgttcaagagaaagtgctgcaggagaaggtgagcggccgc

SEQ ID NO: 507 - DNA, 1097 bp, synthetic construct
  source 1..1097: mol_type = other DNA; note = mmLucy-FLAG-rho-OR4P4
ggatccgccaccatgagccaccagatcctgctgctcctggccctgctgaccctaggcctggctgattacaaggacgacgacgataagatcgaattgatgaacgggaccgagggcccaaacttctacgtgcctttctccaacaagacgggcgtggtggaattcatggaaaaaagcaataatagcactttgtttattctcttggggttttcccaaaataagaacattgaagtcctctgctttgtattatttttgttttgctacattgctatttggatgggaaacttactcataatgatttctatcacgtgcacccagctcattcaccaacccatgtatttcttcctcaattacctctcactctccgacctttgctacacatccacagtgacccccaaattaatggttgacttactggcagaaagaaagaccatttcctataataactgtatgatacaactctttaccacccatttttttggaggcatagagatcttcattctcacagggatggcctatgaccgctatgtggccatttgcaagcccctgcactacaccattattatgagcaggcaaaagtgtaacacaatcatcatagtttgttgtactgggggatttatacattctgccagtcagtttcttctcaccatctttgtaccattttgtggcccaaatgagatagatcactacttctgtgatgtgtatcctttgctgaaattggcctgttctaatatacacatgataggtctcttagtcattgctaattcaggcttaattgctttggtgacatttgttgtcttgttgttgtcttatgtttttatattgtataccatcagagcatactctgcagagagacgcagcaaagctcttgccacttgtagttctcatgtaattgttgtggtcctgttttttgcacctgcattgttcatttacattagaccggtcacaacattctcagaagataaagtgtttgcccttttttataccatcattgctcccatgttcaaccctctcatatacacgctgaggaacaaagaagttaaaaaggccataaagaggttgttcaagagaaagtgctgcaggagaaggtgagcggccgc

SEQ ID NO: 508 - DNA, 1106 bp, synthetic construct
  source 1..1106: mol_type = other DNA; note = mmLucy-FLAG-rho-OR4Q3
ggatccgccaccatgagccaccagatcctgctgctcctggccctgctgaccctaggcctggctgattacaaggacgacgacgataagatcgaattgatgaacgggaccgagggcccaaacttctacgtgcctttctccaacaagacgggcgtggtggaattcatgaaaaaagaacaagattctaatgtgacagaatttgttcttctgggcctatcatcttcttgggagctgcagctatttctcttcttactatttttgtttttttacattgctattgtcctgggaaacctcttgatagtggtaacagtgcaagcccatgctcacctgctccaatctcctatgtattattttttaggtcatctctctttcattgacctatgcctgagctgtgttactgtgccaaagatgttaggggatttcctacagcagggcaagagcatctctttttcaggatgcctggcccagatctacttcctccactttctaggagccagtgagatgtttttgctgacagtcatggcctatgacaggtatgttgccatctgtaaccctttgcgctaccttacagtcatgaacccccagctatgcctttggttggttcttgcctgctggtgtgggggttttatccactctatcatgcaggtcatactagtcatccagctgcctttctgtgggcccaatgaactggacaacttctactgtgatgtcccacaagtcatcaagctggcctgcatggacacctatgtggtagaggtgctggtgatagccaacagtggtctgctgtctcttgtctgcttcttggtcttactattctcttatgctatcatcctgatcaccctgagaacacacttctgccagggccagaacaaggtcttctctacctgtgcttctcacctgacagtggtcagcctgatcttcgtgccatgcgtattcatctatttgaggcctttctgcagcttctctgtggataagatattctccttgttttacacagtgattacacctatgttgaaccccctcatctacacactcaggaacaaagaagttaaaaaggccataaagaggttgttcaagagaaagtgctgcaggagaaggtgagcggccgc

SEQ ID NO: 509 - DNA, 1106 bp, synthetic construct
  source 1..1106: mol_type = other DNA; note = mmLucy-FLAG-rho-OR4Q3(F238L)
ggatccgccaccatgagccaccagatcctgctgctcctggccctgctgaccctaggcctggctgattacaaggacgacgacgataagatcgaattgatgaacgggaccgagggcccaaacttctacgtgcctttctccaacaagacgggcgtggtggaattcatgaaaaaagaacaagattctaatgtgacagaatttgttcttctgggcctatcatcttcttgggagctgcagctatttctcttcttactatttttgtttttttacattgctattgtcctgggaaacctcttgatagtggtaacagtgcaagcccatgctcacctgctccaatctcctatgtattattttttaggtcatctctctttcattgacctatgcctgagctgtgttactgtgccaaagatgttaggggatttcctacagcagggcaagagcatctctttttcaggatgcctggcccagatctacttcctccactttctaggagccagtgagatgtttttgctgacagtcatggcctatgacaggtatgttgccatctgtaaccctttgcgctaccttacagtcatgaacccccagctatgcctttggttggttcttgcctgctggtgtgggggttttatccactctatcatgcaggtcatactagtcatccagctgcctttctgtgggcccaatgaactggacaacttctactgtgatgtcccacaagtcatcaagctggcctgcatggacacctatgtggtagaggtgctggtgatagccaacagtggtctgctgtctcttgtctgcttcttggtcttactattctcttatgctatcatcctgatcaccctgagaacacacttctgccagggccagaacaaggtcctctctacctgtgcttctcacctgacagtggtcagcctgatcttcgtgccatgcgtattcatctatttgaggcctttctgcagcttctctgtggataagatattctccttgttttacacagtgattacacctatgttgaaccccctcatctacacactcaggaacaaagaagttaaaaaggccataaagaggttgttcaagagaaagtgctgcaggagaaggtgagcggccgc

SEQ ID NO: 510 - DNA, 1097 bp, synthetic construct
  source 1..1097: mol_type = other DNA; note = mmLucy-FLAG-rho-OR4S1
ggatccgccaccatgagccaccagatcctgctgctcctggccctgctgaccctaggcctggctgattacaaggacgacgacgataagatcgaattgatgaacgggaccgagggcccaaacttctacgtgcctttctccaacaagacgggcgtggtggaattcatgggtgccaagaacaatgtgactgagtttgttttatttggcctttttgagagcagagagatgcagcatacatgctttgtggtattcttcctctttcatgtgctcactgtcctggggaaccttctggtcatcatcaccatcaatgctagaaagaccctgaagtctcccatgtatttcttcctgagccagttgtcttttgctgacatatgttatccatccactaccatacccaagatgattgctgacacttttgtggagcataagatcatctccttcaatggctgcatgacccagctcttttctgcccacttctttggtggcactgagatcttcctccttacagccatggcctatgaccgctatgtggccatctgtaggcccctgcactacacagccatcatggattgccggaagtgtggcctgctagcgggggcctcctggttagctggcttcctgcattccatcctgcagaccctcctcacggttcagctgcctttttgtgggcccaatgagatagacaacttcttctgtgatgttcatcccctgctcaagttggcctgtgcagacacctacatggtaggtctcatcgtggtggccaacagcggtatgatttctttagcatccttttttatccttatcatttcctatgttatcatcttactgaacctaagaagccagtcatctgaggaccggcgtaaggctgtctccacatgtggctcacacgtaatcactgtccttttggttctcatgccccccatgttcatgtacattcgtccctccaccaccctggctgctgacaaacttatcatcctctttaacattgtgatgccacctttgctgaaccctttgatctatacactaaggaacaaagaagttaaaaaggccataaagaggttgttcaagagaaagtgctgcaggagaaggtgagcggccgc

SEQ ID NO: 511 - DNA, 1097 bp, synthetic construct
  source 1..1097: mol_type = other DNA; note = mmLucy-FLAG-rho-OR4S2
ggatccgccaccatgagccaccagatcctgctgctcctggccctgctgaccctaggcctggctgattacaaggacgacgacgataagatcgaattgatgaacgggaccgagggcccaaacttctacgtgcctttctccaacaagacgggcgtggtggaattcatggaaaaaataaacaacgtaactgaattcattttctggggtctttctcagagcccagagattgagaaagtttgttttgtggtgttttctttcttctacataatcattcttctgggaaatctcctcatcatgctgacagtttgcctgagcaacctgtttaagtcacccatgtatttctttctcagcttcttgtcttttgtggacatttgttactcttcagtcacagctcccaagatgattgttgacctgttagcaaaggacaaaaccatctcctatgtggggtgcatgttgcaactgtttggagtacatttctttggttgcactgagatcttcatccttactgtaatggcctatgatcgttatgtggctatctgtaaacccctacattatatgaccatcatgaaccgggagacatgcaataaaatgttattagggacgtgggtaggtgggttcttacactccattatccaagtggctctggtagtccaactacccttttgtggacccaatgagatagatcactacttttgtgatgttcaccctgtgttgaaacttgcctgcacagaaacatacattgttggtgttgttgtgacagccaacagtggtaccattgctctggggagttttgttatcttgctaatctcctacagcatcatcctagtttccctgagaaagcagtcagcagaaggcaggcgcaaagccctctccacctgtggctcccacattgccatggtcgttatctttttcggcccctgtacttttatgtacatgcgccctgatacgaccttttcagaggataagatggtggctgtattttacaccattatcactcccatgttaaatcctctgatttatacactgaggaacaaagaagttaaaaaggccataaagaggttgttcaagagaaagtgctgcaggagaaggtgagcggccgc

SEQ ID NO: 512 - DNA, 1097 bp, synthetic construct
  source 1..1097: mol_type = other DNA; note = mmLucy-FLAG-rho-OR4X1
ggatccgccaccatgagccaccagatcctgctgctcctggccctgctgaccctaggcctggctgattacaaggacgacgacgataagatcgaattgatgaacgggaccgagggcccaaacttctacgtgcctttctccaacaagacgggcgtggtggaattcatggttgctacaaacaatgtgactgaaataattttcgtgggattttcccagaattggagtgagcagagggtcatttctgtgatgtttctcctcatgtacacagctgttgtgctgggcaatggcctcattgtggtgaccatcctggccagcaaagtgctcacctcccccatgtatttctttctcagctacttatcctttgtggagatctgctactgttctgtcatggcccccaagcttatctttgactcctttatcaagaggaaagtcatttctctcaagggctgcctcacacagatgttttccctccatttctttggtggcactgaggcctttctcctgatggtgatggcctatgaccgctatgtggccatctgcaagcccttgcactacatggccatcatgaaccagcgaatgtgtggtctcctcgtggggatagcatggggcgggggcctgctgcattctgttgggcaaaccttcctgattttccagctcccgttctgtggccccaacatcatggaccactacttctgtgatgtccacccagtgctggagctggcctgcgcagacaccttcttcattagcctgctgatcatcaccaatggcggctccatctccgtagtcagtttcttcgtgctgatggcttcctacctgatcatcctgcacttcctgagaagccacaacttggaggggcagcacaaggccctctccacctgtgcctctcatgtcacagttgtcgacctgttcttcataccttgctccttggtctatattaggccctgtgtcaccctccctgcagacaagatagttgctgtattttatacagtggtcacacctctcttaaaccctgtgatttactccttcaggaacaaagaagttaaaaaggccataaagaggttgttcaagagaaagtgctgcaggagaaggtgagcggccgc

SEQ ID NO: 513 - DNA, 1079 bp, synthetic construct
  source 1..1079: mol_type = other DNA; note = mmLucy-FLAG-rho-OR4X2
ggatccgccaccatgagccaccagatcctgctgctcctggccctgctgaccctaggcctggctgattacaaggacgacgacgataagatcgaattgatgaacgggaccgagggcccaaacttctacgtgcctttctccaacaagacgggcgtggtggaattcatgactgaattcatttttctggtactttctcccaaccaggaggtgcagagggtttgctttgtgatatttctgttcttgtacacagcaattgtgctggggaatttcctcattgtgctcactgtcatgaccagcagaagccttggttcccccatgtacttcttcctcagctacctctccttcatggagatctgctactcctccgctacagcccccaaactcatctcagatctgctggctgaaaggaaagtcatatcttggtggggctgcatggcacagcttttcttcttgcacttctttggtggcactgagattttcctgctcactgtgatggcctatgaccactatgtggccatctgcaagcccctcagctacaccaccatcatgaactggcaggtgtgtactgtccttgtaggaatagcatgggtgggaggcttcatgcattcctttgcacaaatccttctcatcttccacctgctcttctgtggccccaatgtgatcaatcactatttctgtgacctagttccccttctcaaacttgcctgctctgacaccttcctcattggtctgctgattgttgccaatggaggcaccctgtctgtgatcagttttggggtcctcttagcatcctatatggtcatcttgctccatctgagaacctggagctctgaagggtggtgcaaagccctctccacctgtgggtcccatttcgctgtggttatcttgttctttgggccctgcgtcttcaactctctgaggccttctaccactctgcccatagacaagatggtggctgtgttctacacagtgataaccgcgatcctgaaccctgtcatctactctctgaggaacaaagaagttaaaaaggccataaagaggttgttcaagagaaagtgctgcaggagaaggtgagcggccgc

SEQ ID NO: 514 - DNA, 1121 bp, synthetic construct
  source 1..1121: mol_type = other DNA; note = mmLucy-FLAG-rho-OR5A1
ggatccgccaccatgagccaccagatcctgctgctcctggccctgctgaccctaggcctggctgattacaaggacgacgacgataagatcgaattgatgaacgggaccgagggcccaaacttctacgtgcctttctccaacaagacgggcgtggtggaattcatgtccataaccaaagcctggaacagctcatcagtgaccatgttcatcctcctgggattcacagaccatccagaactccaggccctcctctttgtgaccttcctgggcatctatcttaccaccctggcctggaacctggccctcatttttctgatcagaggtgacacccatctgcacacacccatgtacttcttcctaagcaacttatctttcattgacatctgctactcttctgctgtggctcccaatatgctcactgacttcttctgggagcagaagaccatatcatttgtgggctgtgctgctcagttttttttctttgtcggcatgggtctgtctgagtgcctcctcctgactgctatggcatacgaccgatatgcagccatctccagcccccttctctaccccactatcatgacccagggcctctgtacacgcatggtggttggggcatatgttggtggcttcctgagctccctgatccaggccagctccatatttaggcttcacttttgcggacccaacatcatcaaccacttcttctgcgacctcccaccagtcctggctctgtcttgctctgacaccttcctcagtcaagtggtgaatttcctcgtggtggtcactgtcggaggaacatcgttcctccaactccttatctcctatggttacatagtgtctgcggtcctgaagatcccttcagcagagggccgatggaaagcctgcaacacgtgtgcctcgcatctgatggtggtgactctgctgtttgggacagcccttttcgtgtacttgcgacccagctccagctacttgctaggcagggacaaggtggtgtctgttttctattcattggtgatccccatgctgaaccctctcatttacagtttgaggaacaaagaagttaaaaaggccataaagaggttgttcaagagaaagtgctgcaggagaaggtgagcggccgc

SEQ ID NO: 515 - DNA, 1115 bp, synthetic construct
  source 1..1115: mol_type = other DNA; note = mmLucy-FLAG-rho-OR5A2
ggatccgccaccatgagccaccagatcctgctgctcctggccctgctgaccctaggcctggctgattacaaggacgacgacgataagatcgaattgatgaacgggaccgagggcccaaacttctacgtgcctttctccaacaagacgggcgtggtggaattcatggctgtaggaaggaacaacacaattgtgacaaaattcattctcctgggactttcagaccatcctcaaatgaagattttccttttcatgttatttctggggctctacctcctgacgttggcctggaacttaagcctcattgccctcattaagatggactctcacctgcacatgcccatgtacttcttcctcagtaacctgtccttcctggacatctgctatgtgtcctccaccgcccctaagatgctgtctgacatcatcacagagcagaaaaccatttcctttgttggctgtgccactcagtactttgtcttctgtgggatggggctgactgaatgctttctcctggcagctatggcctatgaccggtatgctgcaatctgcaaccccttgctttacacagtcctcatatcccatacactttgtttaaagatggtggttggcgcctatgtgggtggattccttagttctttcattgaaacatactctgtctatcagcatgatttctgtgggccctatatgatcaaccactttttctgtgacctccctccagtcctggctctgtcctgctctgataccttcaccagcgaggtggtgaccttcatagtcagtgttgtcgttggaatagtgtctgtgctagtggtcctcatctcttatggttacattgttgctgctgttgtgaagatcagctcagctacaggtaggacaaaggccttcagcacttgtgcctctcacctgactgctgtgaccctcttctatggttctggattcttcatgtacatgcgacccagttccagctactccctaaacagggacaaggtggtgtccatattctatgccttggtgatccccgtggtgaatcccatcatctacagttttaggaacaaagaagttaaaaaggccataaagaggttgttcaagagaaagtgctgcaggagaaggtgagcggccgc

SEQ ID NO: 516 - DNA, 1118 bp, synthetic construct
  source 1..1118: mol_type = other DNA; note = mmLucy-FLAG-rho-OR5AC2
ggatccgccaccatgagccaccagatcctgctgctcctggccctgctgaccctaggcctggctgattacaaggacgacgacgataagatcgaattgatgaacgggaccgagggcccaaacttctacgtgcctttctccaacaagacgggcgtggtggaattcatggatatatcagagggaaataagactcttgtgacagagtttgttctcacaggacttacagatcgaccatggctgcacgtcctcttctttgttgtgtttttggtggtctatctcatcaccatggtgggcaaccttggactgatagttctaatttggaacgacccccatcttcatatgcccatgtacttattccttggtggtttagccttttcagatgcttgtacttcaacctctataacccctaggatgctggtcaatttcttagacaagactgcaatgatatccctagctgagtgcatcacccagttttacttttttgcttccagtgcaactacagaatgcttcctcctggtgatgatggcctatgaccgctatgtagccatatgtaatcccttgctttatccagtgatgatgtccaacaaactcagcgctcagttgctaagtatttcatatgtaattggtttcctgcatcctctggttcatgtgagtttactattgcgactaactttctgcaggtttaacataatacattatttctactgtgaaattttacaactgttcaaaatttcatgcaatggtccatctattaacgcactaatgatatttatttttggtgcttttatacaaatacccactttaatgactatcataatctcttatactcgtgtgctctttgatattctgaaaaaaaagtctgaaaagggcagaagcaaagccttctccacatgcggcgcccatctgctttctgtctcattgtactacggaactctgatcttcatgtatgtgcgtcctgcatctggcttagctgaagaccaagacaaagtgtattctctgttttacacgattataattcccctgctaaacccatttatttacagcttgaggaacaaagaagttaaaaaggccataaagaggttgttcaagagaaagtgctgcaggagaaggtgagcggccgc

SEQ ID NO: 517 - DNA, 1118 bp, synthetic construct
  source 1..1118: mol_type = other DNA; note = mmLucy-FLAG-rho-OR5AC2(M200I)
ggatccgccaccatgagccaccagatcctgctgctcctggccctgctgaccctaggcctggctgattacaaggacgacgacgataagatcgaattgatgaacgggaccgagggcccaaacttctacgtgcctttctccaacaagacgggcgtggtggaattcatggatatatcagagggaaataagactcttgtgacagagtttgttctcacaggacttacagatcgaccatggctgcacgtcctcttctttgttgtgtttttggtggtctatctcatcaccatggtgggcaaccttggactgatagttctaatttggaacgacccccatcttcatatgcccatgtacttattccttggtggtttagccttttcagatgcttgtacttcaacctctataacccctaggatgctggtcaatttcttagacaagactgcaatgatatccctagctgagtgcatcacccagttttacttttttgcttccagtgcaactacagaatgcttcctcctggtgatgatggcctatgaccgctatgtagccatatgtaatcccttgctttatccagtgatgatgtccaacaaactcagcgctcagttgctaagtatttcatatgtaattggtttcctgcatcctctggttcatgtgagtttactattgcgactaactttctgcaggtttaacataatacattatttctactgtgaaattttacaactgttcaaaatttcatgcaatggtccatctattaacgcactaataatatttatttttggtgcttttatacaaatacccactttaatgactatcataatctcttatactcgtgtgctctttgatattctgaaaaaaaagtctgaaaagggcagaagcaaagccttctccacatgcggcgcccatctgctttctgtctcattgtactacggaactctgatcttcatgtatgtgcgtcctgcatctggcttagctgaagaccaagacaaagtgtattctctgttttacacgattataattcccctgctaaacccatttatttacagcttgaggaacaaagaagttaaaaaggccataaagaggttgttcaagagaaagtgctgcaggagaaggtgagcggccgc

SEQ ID NO: 518 - DNA, 1112 bp, synthetic construct
  source 1..1112: mol_type = other DNA; note = mmLucy-FLAG-rho-OR5AK2
ggatccgccaccatgagccaccagatcctgctgctcctggccctgctgaccctaggcctggctgattacaaggacgacgacgataagatcgaattgatgaacgggaccgagggcccaaacttctacgtgcctttctccaacaagacgggcgtggtggaattcatgacactaggaaacagcactgaagtcactgaattctatcttctgggatttggtgcccagcatgagttttggtgtatcctcttcattgtattccttctcatctatgtgacctccataatgggtaatagtggaataatcttactcatcaacacagattccagatttcaaacactcacgtacttttttctacaacatttggcttttgttgatatctgttacacttctgctatcactcccaagatgctccaaagcttcacagaagaaaagaatttgatgttatttcagggctgtgtgatacaattcttagtttatgcaacatttgcaaccagtgactgttatctcctggctatgatggcagtggatccttatgttgccatctgtaagccccttcactatactgtaatcatgtcccgaacagtctgcatccgtttggtagctggttcatacatcatgggctcaataaatgcctctgtacaaacaggttttacatgttcactgtccttctgcaagtccaatagcatcaatcactttttctgtgatgttccccctattcttgctctttcatgctccaatgttgacatcaacatcatgctacttgttgtctttgtgggatctaacttgatattcactgggttggtcgtcatcttttcctacatctacatcatggccaccatcctgaaaatgtcttctagtgcaggaaggaaaaaatccttctcaacatgtgcttcccacctgaccgcagtcaccattttctatgggacactctcttacatgtatttgcagtctcattctaataattcccaggaaaatatgaaagtggcctttatattttatggcacagttattcccatgttaaatcctttaatctatagcttgaggaacaaagaagttaaaaaggccataaagaggttgttcaagagaaagtgctgcaggagaaggtgagcggccgc

SEQ ID NO: 519 - DNA, 1112 bp, synthetic construct
  source 1..1112: mol_type = other DNA; note = mmLucy-FLAG-rho-OR5AK2(M92I)
ggatccgccaccatgagccaccagatcctgctgctcctggccctgctgaccctaggcctggctgattacaaggacgacgacgataagatcgaattgatgaacgggaccgagggcccaaacttctacgtgcctttctccaacaagacgggcgtggtggaattcatgacactaggaaacagcactgaagtcactgaattctatcttctgggatttggtgcccagcatgagttttggtgtatcctcttcattgtattccttctcatctatgtgacctccataatgggtaatagtggaataatcttactcatcaacacagattccagatttcaaacactcacgtacttttttctacaacatttggcttttgttgatatctgttacacttctgctatcactcccaagatgctccaaagcttcacagaagaaaagaatttgatattatttcagggctgtgtgatacaattcttagtttatgcaacatttgcaaccagtgactgttatctcctggctatgatggcagtggatccttatgttgccatctgtaagccccttcactatactgtaatcatgtcccgaacagtctgcatccgtttggtagctggttcatacatcatgggctcaataaatgcctctgtacaaacaggttttacatgttcactgtccttctgcaagtccaatagcatcaatcactttttctgtgatgttccccctattcttgctctttcatgctccaatgttgacatcaacatcatgctacttgttgtctttgtgggatctaacttgatattcactgggttggtcgtcatcttttcctacatctacatcatggccaccatcctgaaaatgtcttctagtgcaggaaggaaaaaatccttctcaacatgtgcttcccacctgaccgcagtcaccattttctatgggacactctcttacatgtatttgcagtctcattctaataattcccaggaaaatatgaaagtggcctttatattttatggcacagttattcccatgttaaatcctttaatctatagcttgaggaacaaagaagttaaaaaggccataaagaggttgttcaagagaaagtgctgcaggagaaggtgagcggccgc

SEQ ID NO: 520 - DNA, 1115 bp, synthetic construct
  source 1..1115: mol_type = other DNA; note = mmLucy-FLAG-rho-OR5AN1
ggatccgccaccatgagccaccagatcctgctgctcctggccctgctgaccctaggcctggctgattacaaggacgacgacgataagatcgaattgatgaacgggaccgagggcccaaacttctacgtgcctttctccaacaagacgggcgtggtggaattcatgactgggggaggaaatattacagaaatcacctatttcatcctgctgggattctcagattttcccaggatcataaaagtgctcttcactatattcctggtgatctacattacatctctggcctggaacctctccctcattgttttaataaggatggattcccacctccatacacccatgtatttcttcctcagtaacctgtccttcatagatgtctgctatatcagctccacagtccccaagatgctctccaacctcttacaggaacagcaaactatcacttttgttggttgtattattcagtactttatcttttcaacgatgggactgagtgagtcttgtctcatgacagccatggcttatgatcgttatgctgccatttgtaaccccctgctctattcatccatcatgtcacccaccctctgtgtttggatggtactgggagcctacatgactggcctcactgcttctttattccaaattggtgctttgcttcaactccacttctgtgggtctaatgtcatcagacatttcttctgtgacatgccccaactgttaatcttgtcctgtactgacactttctttgtacaggtcatgactgctatattaaccatgttctttgggatagcaagtgccctagttatcatgatatcctatggctatattggcatctccatcatgaagatcacttcagctaaaggcaggtccaaggcattcaacacctgtgcttctcatctaacagctgtttccctcttctatacatcaggaatctttgtctatttgagttccagctctggaggttcttcaagctttgacagatttgcatctgttttctacactgtggtcattcccatgttaaatcccttgatttacagtttgaggaacaaagaagttaaaaaggccataaagaggttgttcaagagaaagtgctgcaggagaaggtgagcggccgc

SEQ ID NO: 521 - DNA, 1121 bp, synthetic construct
  source 1..1121: mol_type = other DNA; note = mmLucy-FLAG-rho-OR5AP2
ggatccgccaccatgagccaccagatcctgctgctcctggccctgctgaccctaggcctggctgattacaaggacgacgacgataagatcgaattgatgaacgggaccgagggcccaaacttctacgtgcctttctccaacaagacgggcgtggtggaattcatgaaagaggttcgaggcagaaatcaaacagaagtaacagaatttctcctcttaggactttccgacaatccagatctacaaggagtcctctttgcattgtttctgttgatctatatggcaaacatggtgggcaatttggggatgattgtattgattaagattgatctctgtctccacacccccatgtatttctttctcagtagcctctcttttgtagatgcctcttactcttcttccgtcactcccaagatgctggtgaacctcatggctgagaataaggccatttcttttcatggatgtgctgcccagttctacttctttggctccttcctggggactgagtgcttcctgttggccatgatggcatatgaccgctatgcagccatttggaaccccctgctctacccagttctcgtgtctgggagaatttgctttttgctaatagctacctccttcttagcaggttgtggaaatgcagccatacatacagggatgacttttaggttgtccttttgtggttctaataggatcaaccatttctactgtgacaccccgccactgctcaaactctcttgctctgatacccacttcaatggcattgtgatcatggcattctcaagttttattgtcatcagctgtgttatgattgtcctcatttcctacctgtgtatcttcattgccgtcttgaagatgccttcgttagagggcaggcacaaagccttctccacctgtgcctcttacctcatggctgtcaccatattctttggaacaatcctcttcatgtacttgcgccctacatctagctactcaatggagcaagacaaggttgtctctgtcttttatacagtaataatccctgtgctaaatcccctcatctatagtttaaggaacaaagaagttaaaaaggccataaagaggttgttcaagagaaagtgctgcaggagaaggtgagcggccgc

SEQ ID NO: 522 - DNA, 1112 bp, synthetic construct
  source 1..1112: mol_type = other DNA; note = mmLucy-FLAG-rho-OR5AR1
ggatccgccaccatgagccaccagatcctgctgctcctggccctgctgaccctaggcctggctgattacaaggacgacgacgataagatcgaattgatgaacgggaccgagggcccaaacttctacgtgcctttctccaacaagacgggcgtggtggaattcatggataaagaaaacagctcaatggtgactgagtttatcttcatgggcatcacccaggaccctcagatggagatcatcttcttcgtggtcttcctcatagtttacctggttaatgtagtggggaatattggtatgattatcctgattacaacagacactcagcttcacacacccatgtattttttcctctgcaacctctcctttgttgacctgggctactcctcagccattgcccccaggatgctggctgacttcctaacaaatcacaaagttatctccttctccagctgtgccacccagtttgctttttttgtaggttttgtggatgctgagtgctatgtcctggcagccatggcctatggtcgttttgtggccatttgtcgacccctccactatagcaccttcatgtccaagcaggtctgcttggctctcatgctgggctcttacctggctggtctagtgagtttagtagcccacactaccctcaccttcagcctgagttactgtggttccaatatcatcaatcatttcttctgcgaaatcccaccactcttggccctctcttgctcagacacctacatcagtgagatcttgctcttcagtctgtgtggcttcattgaattcagcaccatcctcatcatcttcatctcctatacctttatccttgttgcaatcatcagaatgcgttcagctgaaggccgccttaaggctttctccacctgcgggtctcaccttactggcatcaccctcttctatggcacagtcatgtttatgtacctgaggccaacatccagctactccctggaccaagacaagtgggcctctgtgttctacacggttatcatccccatgttaaatcccttgatctacagtttgaggaacaaagaagttaaaaaggccataaagaggttgttcaagagaaagtgctgcaggagaaggtgagcggccgc

SEQ ID NO: 523 - DNA, 1112 bp, synthetic construct
  source 1..1112: mol_type = other DNA; note = mmLucy-FLAG-rho-OR5AS1
ggatccgccaccatgagccaccagatcctgctgctcctggccctgctgaccctaggcctggctgattacaaggacgacgacgataagatcgaattgatgaacgggaccgagggcccaaacttctacgtgcctttctccaacaagacgggcgtggtggaattcatgttggagagtaattacaccatgccaactgagttcctatttgttggattcacagattatctacctctcagagtcacactgttcttggtattccttctggtatatacattaactatggtcggaaatatactcttaataattctagttaatattaattcaagccttcaaattcccatgtattattttcttagcaacttatctttcttagacatcagctgttctacagcaatcactcctaaaatgctggcaaacttcttggcatccaggaaaagcatctctccttatgggtgtgcactacaaatgtttttcttcgcttcttttgctgatgctgagtgccttatcctggcagcaatggcttatgaccgctatgcagccatctgcaacccactgctctatactacactgatgtctaggagagtctgtgtctgcttcattgtgttggcatatttcagtggaagtacaacatcactggtccatgtgtgcctcacattcaggctgtcattttgtggctccaatatcgtcaatcattttttctgtgatatcccacctcttctggctttatcatgtacagacactcagatcaaccagcttctgctctttgctttgtgcagcttcatccagaccagcacttttgtggtaatatttatttcttacttctgcatcctcatcactgtgttgagcatcaagtcctcaggtggcagaagcaaaacattctccacttgtgcttcccacctcatagcagtcaccttattctatggagcgctcctgtttatgtacttacagcccaccactagctattccctagacactgataaggtggtggcagtgttttatactgttgtatttcccatgtttaatccaataatttatagtttcaggaacaaagaagttaaaaaggccataaagaggttgttcaagagaaagtgctgcaggagaaggtgagcggccgc

SEQ ID NO: 524 - DNA, 1112 bp, synthetic construct
  source 1..1112: mol_type = other DNA; note = mmLucy-FLAG-rho-OR5AU1
ggatccgccaccatgagccaccagatcctgctgctcctggccctgctgaccctaggcctggctgattacaaggacgacgacgataagatcgaattgatgaacgggaccgagggcccaaacttctacgtgcctttctccaacaagacgggcgtggtggaattcatgaaaggggcaaacctgagccaagggatggagtttgagctcttgggcctcaccactgacccccagctccagaggctgctcttcgtggtgttcctgggcatgtacacagccactctgctggggaacctggtcatgttcctcctgatccatgtgagtgccaccctgcacacacccatgtactccctcctgaagagcttctccttcttggatttctgctactcctccacggttgtgccccagaccctggtgaacttcttggccaagaggaaagtgatctcttattttggctgcatgactcagatgttcttctatgcgggttttgccaccagtgagtgctatctcatcgctgccatggcctatgaccgctatgccgctatttgtaaccccctgctctactcaaccatcatgtctcctgaggtctgtgcctcgctgattgtgggctcctacagtgcaggattcctcaattctcttatccacactggctgtatctttagtctgaaattctgcggtgctcatgtcgtcactcacttcttctgtgatgggccacccatcctgtccttgtcttgtgtagacacctcactgtgtgagatcctgctcttcatttttgctggtttcaaccttttgagctgcaccctcaccatcttgatctcctacttcttaattctcaacaccatcctgaaaatgagctcggcccagggcaggtttaaggcattttccacctgtgcatcccacctcactgccgtctgcctcttctttggcacaacactttttatgtacctgcgccccaggtccagctactccttgacccaggaccgcacagttgctgtcatctacacagtggtgatcccagtgctgaaccccctcatgtactctttgaggaacaaagaagttaaaaaggccataaagaggttgttcaagagaaagtgctgcaggagaaggtgagcggccgc

SEQ ID NO: 525 - DNA, 1106 bp, synthetic construct
  source 1..1106: mol_type = other DNA; note = mmLucy-FLAG-rho-OR5B12(C141R)
ggatccgccaccatgagccaccagatcctgctgctcctggccctgctgaccctaggcctggctgattacaaggacgacgacgataagatcgaattgatgaacgggaccgagggcccaaacttctacgtgcctttctccaacaagacgggcgtggtggaattcatggagaacaacacagaggtgactgaattcatccttgtggggttaactgatgacccagaactgcagatcccactcttcatagtcttccttttcatctacctcatcactctggttgggaacctggggatgattgaattgattctactggactcctgtctccacacccccatgtacttcttcctcagtaacctctccctggtggactttggttattcctcagctgtcactcccaaggtgatggtggggtttctcacaggagacaaattcatattatataatgcttgtgccacacaattcttcttctttgtagcctttatcactgcagaaagtttcctcctggcatcaatggcctatgaccgctatgcagcattgtgtaaacccctgcattacaccaccaccatgacaacaaatgtatgtgctcgcctggccataggctcctacatctgtggtttcctgaatgcatccattcatactgggaacactttcaggctctccttctgtagatccaatgtagttgaacactttttctgtgatgctcctcctctcttgactctctcatgttcagacaactacatcagtgagatggttattttttttgtggtgggattcaatgacctcttttctatcctggtaatcttgatctcctacttatttatatttatcaccatcatgaagatgcgctcacctgaaggacgccagaaggccttttctacttgtgcttcccaccttactgcagtttccatcttttatgggacaggaatctttatgtacttacgacctaactccagccatttcatgggcacagacaaaatggcatctgtgttctatgccatagtcattcccatgttgaatccactggtctacagcctgaggaacaaagaagttaaaaaggccataaagaggttgttcaagagaaagtgctgcaggagaaggtgagcggccgc

SEQ ID NO: 526 - DNA, 1106 bp, synthetic construct
  source 1..1106: mol_type = other DNA; note = mmLucy-FLAG-rho-OR5B17
ggatccgccaccatgagccaccagatcctgctgctcctggccctgctgaccctaggcctggctgattacaaggacgacgacgataagatcgaattgatgaacgggaccgagggcccaaacttctacgtgcctttctccaacaagacgggcgtggtggaattcatggagaataatacagaggtgagtgaattcatcctgcttggtctaaccaatgccccagaactacaggttcccctctttatcatgtttaccctcatctacctcatcactctgactgggaacctggggatgatcatattaatcctgctggactctcatctccacactcccatgtacttttttctcagtaacctgtctcttgcaggcattggttactcctcagctgtcactccaaaggttttaactgggttgcttatagaagacaaagccatctcctacagtgcctgtgctgctcagatgttcttttgtgcagtctttgccactgtggaaaattacctcttgtcctcaatggcctatgaccgctacgcagcagtgtgtaaccccctacattataccaccaccatgacaacacgtgtgtgtgcttgtctggctataggctgttatgtcattggttttctgaatgcttctatccaaattggagatacatttcgcctctctttctgcatgtccaatgtgattcatcactttttctgtgacaaaccagcagtcattactctgacctgctctgagaaacacattagtgagttgattcttgttcttatatcaagttttaatgtcttttttgcacttcttgttaccttgatttcctatctgttcatattgatcaccattcttaagaggcacacaggtaagggataccagaagcctttatctacctgtggttctcacctcattgccattttcttattttatataactgtcatcatcatgtacatacgaccaagttccagtcattccatggacacagacaaaattgcatctgtgttctacactatgatcatccccatgctcagtcctatagtctataccctgaggaacaaagaagttaaaaaggccataaagaggttgttcaagagaaagtgctgcaggagaaggtgagcggccgc

SEQ ID NO: 527 - DNA, 1106 bp, synthetic construct
  source 1..1106: mol_type = other DNA; note = mmLucy-FLAG-rho-OR5B17(L80I)
ggatccgccaccatgagccaccagatcctgctgctcctggccctgctgaccctaggcctggctgattacaaggacgacgacgataagatcgaattgatgaacgggaccgagggcccaaacttctacgtgcctttctccaacaagacgggcgtggtggaattcatggagaataatacagaggtgagtgaattcatcctgcttggtctaaccaatgccccagaactacaggttcccctctttatcatgtttaccctcatctacctcatcactctgactgggaacctggggatgatcatattaatcctgctggactctcatctccacactcccatgtacttttttctcagtaacctgtctcttgcaggcattggttactcctcagctgtcactccaaaggttataactgggttgcttatagaagacaaagccatctcctacagtgcctgtgctgctcagatgttcttttgtgcagtctttgccactgtggaaaattacctcttgtcctcaatggcctatgaccgctacgcagcagtgtgtaaccccctacattataccaccaccatgacaacacgtgtgtgtgcttgtctggctataggctgttatgtcattggttttctgaatgcttctatccaaattggagatacatttcgcctctctttctgcatgtccaatgtgattcatcactttttctgtgacaaaccagcagtcattactctgacctgctctgagaaacacattagtgagttgattcttgttcttatatcaagttttaatgtcttttttgcacttcttgttaccttgatttcctatctgttcatattgatcaccattcttaagaggcacacaggtaagggataccagaagcctttatctacctgtggttctcacctcattgccattttcttattttatataactgtcatcatcatgtacatacgaccaagttccagtcattccatggacacagacaaaattgcatctgtgttctacactatgatcatccccatgctcagtcctatagtctataccctgaggaacaaagaagttaaaaaggccataaagaggttgttcaagagaaagtgctgcaggagaaggtgagcggccgc

SEQ ID NO: 528 - DNA, 1106 bp, synthetic construct
  source 1..1106: mol_type = other DNA; note = mmLucy-FLAG-rho-OR5B2
ggatccgccaccatgagccaccagatcctgctgctcctggccctgctgaccctaggcctggctgattacaaggacgacgacgataagatcgaattgatgaacgggaccgagggcccaaacttctacgtgcctttctccaacaagacgggcgtggtggaattcatggagaattgtacggaagtgacaaagttcattcttctaggactaaccagtgtcccagaactacagatccccctctttatcttgttcaccttcatctacctcctcactctgtgtgggaacctggggatgatgttgctgatcctgatggactcttgtctccacacccccatgtactttttcctcagtaacctgtctctggtggactttggatactcctcagctgtcactcccaaggtcatggctgggttccttagaggagacaaggtcatctcctacaatgcatgtgctgttcagatgttcttctttgtagccttggccacggtggaaaattacttgttggcctcaatggcctatgaccgctatgcagcagtgtgcaaacccctacactacaccaccaccatgacggccagtgtaggtgcctgtctggccctaggctcatatgtctgtggcttcctaaatgcctcattccacattgggggcatattcagtctctctttctgtaaatccaatctggtacatcactttttctgtgatgttccagcagtcatggctctgtcttgctctgataaacacactagtgaggtgattctggtttttatgtcaagctttaatatcttttttgttcttctagttatctttatctcctacttgttcatattcatcaccatcttgaagatgcattcagctaagggacaccaaaaagcattgtccacctgtgcctctcacttcactgcagtctccgtcttctatgggacagtaatcttcatctacttgcagcccagctccagccactccatggacacagacaaaatggcatctgtgttctatgctatgatcatccccatgctgaaccctgtggtctacagcctgaggaacaaagaagttaaaaaggccataaagaggttgttcaagagaaagtgctgcaggagaaggtgagcggccgc

SEQ ID NO: 529 - DNA, 1106 bp, synthetic construct
  source 1..1106: mol_type = other DNA; note = mmLucy-FLAG-rho-OR5B2(M200T,V208A)
ggatccgccaccatgagccaccagatcctgctgctcctggccctgctgaccctaggcctggctgattacaaggacgacgacgataagatcgaattgatgaacgggaccgagggcccaaacttctacgtgcctttctccaacaagacgggcgtggtggaattcatggagaattgtacggaagtgacaaagttcattcttctaggactaaccagtgtcccagaactacagatccccctctttatcttgttcaccttcatctacctcctcactctgtgtgggaacctggggatgatgttgctgatcctgatggactcttgtctccacacccccatgtactttttcctcagtaacctgtctctggtggactttggatactcctcagctgtcactcccaaggtcatggctgggttccttagaggagacaaggtcatctcctacaatgcatgtgctgttcagatgttcttctttgtagccttggccacggtggaaaattacttgttggcctcaatggcctatgaccgctatgcagcagtgtgcaaacccctacactacaccaccaccatgacggccagtgtaggtgcctgtctggccctaggctcatatgtctgtggcttcctaaatgcctcattccacattgggggcatattcagtctctctttctgtaaatccaatctggtacatcactttttctgtgatgttccagcagtcatggctctgtcttgctctgataaacacactagtgaggtgattctggtttttacgtcaagctttaatatcttttttgctcttctagttatctttatctcctacttgttcatattcatcaccatcttgaagatgcattcagctaagggacaccaaaaagcattgtccacctgtgcctctcacttcactgcagtctccgtcttctatgggacagtaatcttcatctacttgcagcccagctccagccactccatggacacagacaaaatggcatctgtgttctatgctatgatcatccccatgctgaaccctgtggtctacagcctgaggaacaaagaagttaaaaaggccataaagaggttgttcaagagaaagtgctgcaggagaaggtgagcggccgc

SEQ ID NO: 530 - DNA, 1103 bp, synthetic construct
  source 1..1103: mol_type = other DNA; note = mmLucy-FLAG-rho-OR5B21
ggatccgccaccatgagccaccagatcctgctgctcctggccctgctgaccctaggcctggctgattacaaggacgacgacgataagatcgaattgatgaacgggaccgagggcccaaacttctacgtgcctttctccaacaagacgggcgtggtggaattcatggagaatagcacagaagtgacagagtttatcctcttgggattaacagatgaccccaatcttcagatacccctcctcctggcatttttattcatctacctcatcaccctgcttgggaatgggggaatgatggtgatcatccactcagactcccatctccacactccaatgtactttttcctcagtaacctctcccttgtagacttgggttactcatcagctgtagcccccaaaacggtggctgcattgcggtcaggggacaaggccatctcctacgatggatgtgcagctcagttcttcttctttgtggggtttgccactgttgagtgctacctcctggcctccatggcctatgatcgccatgcagcggtatgtaggcctcttcattacaccaccaccatgacagcaggtgtgtgtgccctccttgctactggttcctatgtctctggcttcctcaatgcctctatccatgcagcaggcaccttcagactctccttctgtggttctaatgagattaatcatttcttctgtgacattcccccactcctggctctctcatgctctgacacacgcatcagcaagttggtggtctttgtggcaggcttcaacgtctttttcaccctcctggtcatccttatttcttacttcttcatatgcatcaccattcagaggatgcattctgctgaagggcagaagaaagtcttctccacctgtgcttcccatctcactgctttgtccatcttctatggcacaatcatcttcatgtacttacagcccaactccagccagtccgtggacacagacaaaatagcctctgtgttttacacagtggtgattcccatgctgaatcccttgatatacagccttaggaacaaagaagttaaaaaggccataaagaggttgttcaagagaaagtgctgcaggagaaggtgagcggccgc

SEQ ID NO: 531 - DNA, 1106 bp, synthetic construct
  source 1..1106: mol_type = other DNA; note = mmLucy-FLAG-rho-OR5B3
ggatccgccaccatgagccaccagatcctgctgctcctggccctgctgaccctaggcctggctgattacaaggacgacgacgataagatcgaattgatgaacgggaccgagggcccaaacttctacgtgcctttctccaacaagacgggcgtggtggaattcatggaaaataagacagaagtaacacaattcattcttctaggactaaccaatgactcagaactgcaggttcccctctttataacgttccccttcatctatattatcactctggttggaaacctgggaattattgtattgatattctgggattcctgtctccacaatcccatgtacttttttctcagtaacttgtctctagtggacttttgctactcttcagctgtcactcccatcgtcatggctggattccttatagaagacaaggtcatctcttacaatgcatgtgctgctcaaatgtatatctttgtagcttttgccactgtggaaaattacctcttggcctcaatggcctatgaccgctatgcagcagtgtgcaaacccctacattacaccacaaccatgacaacaactgtgtgtgctcgtctggccataggctcctacctctgtggtttcctgaatgcctccatccacactggggacacatttagtctctctttctgtaagtccaatgaagtccatcactttttctgtgatattccagcagtcatggttctctcttgctctgatagacatattagcgagcttgttcttatttatgttgtgagcttcaatatctttatagctctcctggttatcttgatatcctacacattcatttttatcaccatcctaaagatgcactcagcttcagtataccagaagcctttgtccacctgtgcctctcatttcattgcagtcggcatcttctatgggactattatcttcatgtacttacaacccagctccagtcactccatggacacagacaaaatggcacctgtgttctatacaatggtcatccccatgctgaaccctctggtctatagtctgaggaacaaagaagttaaaaaggccataaagaggttgttcaagagaaagtgctgcaggagaaggtgagcggccgc

SEQ ID NO: 532 - DNA, 1106 bp, synthetic construct
  source 1..1106: mol_type = other DNA; note = mmLucy-FLAG-rho-OR5B3(W49R,N170S,A181T,I198V,G247A)
ggatccgccaccatgagccaccagatcctgctgctcctggccctgctgaccctaggcctggctgattacaaggacgacgacgataagatcgaattgatgaacgggaccgagggcccaaacttctacgtgcctttctccaacaagacgggcgtggtggaattcatggaaaataagacagaagtaacacaattcattcttctaggactaaccaatgactcagaactgcaggttcccctctttataacgttccccttcatctatattatcactctggttggaaacctgggaattattgtattgatattcagggattcctgtctccacaatcccatgtacttttttctcagtaacttgtctctagtggacttttgctactcttcagctgtcactcccatcgtcatggctggattccttatagaagacaaggtcatctcttacaatgcatgtgctgctcaaatgtatatctttgtagcttttgccactgtggaaaattacctcttggcctcaatggcctatgaccgctatgcagcagtgtgcaaacccctacattacaccacaaccatgacaacaactgtgtgtgctcgtctggccataggctcctacctctgtggtttcctgaatgcctccatccacactggggacacatttagtctctctttctgtaagtccagtgaagtccatcactttttctgtgatattccaacagtcatggttctctcttgctctgatagacatattagcgagcttgttcttgtttatgttgtgagcttcaatatctttatagctctcctggttatcttgatatcctacacattcatttttatcaccatcctaaagatgcactcagcttcagtataccagaagcctttgtccacctgtgcctctcatttcattgcagtcgccatcttctatgggactattatcttcatgtacttacaacccagctccagtcactccatggacacagacaaaatggcacctgtgttctatacaatggtcatccccatgctgaaccctctggtctatagtctgaggaacaaagaagttaaaaaggccataaagaggttgttcaagagaaagtgctgcaggagaaggtgagcggccgc

SEQ ID NO: 533 - DNA, 1124 bp, synthetic construct
  source 1..1124: mol_type = other DNA; note = mmLucy-FLAG-rho-OR5C1
ggatccgccaccatgagccaccagatcctgctgctcctggccctgctgaccctaggcctggctgattacaaggacgacgacgataagatcgaattgatgaacgggaccgagggcccaaacttctacgtgcctttctccaacaagacgggcgtggtggaattcatgaactcagagaacctcacccgggccgcggttgcccctgctgaattcgtcctcctgggcatcacaaatcgctgggacctgcgtgtggccctcttcctgacctgcctgcctgtctacctggtgagcctgctgggaaacatgggcatggcgctgctgatccgcatggatgcccggctccacacacctatgtacttcttcctggccaacctctccctgctggatgcctgctattcctccgccatcggccccaagatgctagtggacctgctgctgccccgagccaccatcccttacacagcctgtgccctccagatgtttgtctttgcaggtctggctgatactgagtgttgcttgctggcagccatggcctatgaccgctacgtggccatcagaaacccacttctctatacaacagctatgtcgcagcgtctatgcctggccttgctgggagcatcaggcctgggtggggcagtgagtgcctttgttcacacaaccctcaccttccgcctgagcttctgccgctcccggaagatcaatagcttcttctgcgatatccctccactgctggccatctcgtgcagtgacaccagtctcaatgaactccttctcttcgccatctgtggcttcatccagacagccacggtgttagctatcacggtgtcttatggcttcatcgctggggctgtgatccacatgcgctcggtcgagggcagtcggcgagcagcctccaccggtggttcccacctcacagccgtggccatgatgtacgggacactcattttcatgtacctgcgccccagctccagctatgccctggacactgacaagatggcctctgtgttctataccctggtcatcccgtctctcaacccactcatctacagcctcaggaacaaagaagttaaaaaggccataaagaggttgttcaagagaaagtgctgcaggagaaggtgagcggccgc

SEQ ID NO: 534 - DNA, 1118 bp, synthetic construct
  source 1..1118: mol_type = other DNA; note = mmLucy-FLAG-rho-OR5D13(C62Y)
ggatccgccaccatgagccaccagatcctgctgctcctggccctgctgaccctaggcctggctgattacaaggacgacgacgataagatcgaattgatgaacgggaccgagggcccaaacttctacgtgcctttctccaacaagacgggcgtggtggaattcatgatggcatctgaaagaaatcaaagcagcacacccacttttattctcttgggtttttcagaatacccagaaatccaggttccactctttctggttttcttgttcgtctacacagtcactgtagtggggaacttgggcatgataataatcatcagactcaattcaaaactccatacaatcatgtactttttccttagtcacttgtccttgacagacttctgtttttccactgtagttacacctaaactgttggagaacttggttgtggaatacagaaccatctctttctctggttgcatcatgcaattttgttttgcttgcatttttggagtgacagaaactttcatgttagcagcgatggcttatgaccgttttgtggcagtttgtaaacccttgctgtataccactattatgtctcagaagctctgtgctcttctggtggctgggtcctatacatgggggatagtgtgctccctgatactcacatattttcttcttgacttatcgttttgtgaatctaccttcataaataattttatctgtgaccactctgtaattgtttctgcctcctactcagacccctatatcagccagaggctatgctttattattgccatattcaatgaggtgagcagcctaattatcattctgacatcatatatgcttattttcactaccattatgaagatgcgatctgcaagtgggcgccagaaaactttctccacctgtgcctcccacctgacagccatcactatcttccatggaactatccttttcctttactgtgttcctaatcctaaaacttctagcctcatagttacagtggcttctgtgttttacacagtggcgattccaatgctgaacccattgatctacagccttaggaacaaagaagttaaaaaggccataaagaggttgttcaagagaaagtgctgcaggagaaggtgagcggccgc

SEQ ID NO: 535 - DNA, 1118 bp, synthetic construct
  source 1..1118: mol_type = other DNA; note = mmLucy-FLAG-rho-OR5D14(S249A)
ggatccgccaccatgagccaccagatcctgctgctcctggccctgctgaccctaggcctggctgattacaaggacgacgacgataagatcgaattgatgaacgggaccgagggcccaaacttctacgtgcctttctccaacaagacgggcgtggtggaattcatgatgatggttttaaggaatctgagcatggagcccacctttgcccttttaggtttcacagattacccaaagcttcagattcctctcttccttgtgtttctgctcatgtatgttatcacagtggtaggaaaccttgggatgatcataataatcaagattaaccccaaatttcacactcctatgtactttttccttagtcacctctcttttgttgatttttgttactcttccattgtcactcccaagctgcttgagaacttggtaatggcagataaaagcatcttctactttagctgcatgatgcagtacttcctgtcctgcactgctgtggtgacagagtctttcttgctggcagtgatggcctatgaccgctttgtggccatctgcaatcctctgctttatacagtggccatgtcacagaggctctgtgccctgctggtggctgggtcatatctctggggcatgtttggccccttggtactcctttgttatgctctccggttaaacttctctggacctaatgtaatcaaccacttcttttgtgagtatactgctctcatctctgtgtctggctctgatatactcatcccccacctgctgcttttcagcttcgccaccttcaatgagatgtgtacactactgatcatcctcacttcctatgttttcatttttgtgactgtactaaaaatccgttctgttagtgggcgccacaaagccttctccacctgggcctcccacctgactgctatcaccatcttccatgggaccatccttttcctttactgtgtacccaactccaaaaactctcggcaaacagtcaaagtggcctctgtattttacacagttgtcaaccccatgctgaaccctctgatctacagcctaaggaacaaagaagttaaaaaggccataaagaggttgttcaagagaaagtgctgcaggagaaggtgagcggccgc

SEQ ID NO: 536 - DNA, 1118 bp, synthetic construct
  source 1..1118: mol_type = other DNA; note = mmLucy-FLAG-rho-OR5D16
ggatccgccaccatgagccaccagatcctgctgctcctggccctgctgaccctaggcctggctgattacaaggacgacgacgataagatcgaattgatgaacgggaccgagggcccaaacttctacgtgcctttctccaacaagacgggcgtggtggaattcatgtttctgacagagagaaatacgacatctgaggccacattcactctcttgggcttctcagattacctggaactgcaaattcccctcttctttgtatttctggcagtctacggcttcagtgtggtagggaatcttgggatgatagtgatcatcaaaattaacccaaaattgcatacccccatgtattttttcctcaaccacctctcctttgtggatttctgctattcctccatcattgctcccatgatgctggtgaacctggttgtagaagatagaaccatttcattctcaggatgtttggtgcaattctttttcttttgcacctttgtagtgactgaattaattctatttgcggtgatggcctatgaccactttgtggccatttgcaatcctctgctctacacagttgccatctcccagaaactctgtgccatgctggtggttgtattgtatgcatggggagtcgcatgttccctgacactcgcgtgctctgctttaaagttatcttttcatggtttcaacacaatcaatcatttcttctgtgagttatcctccctgatatcactctcttaccctgactcttatctcagccagttgcttcttttcactgttgccacttttaatgagataagcacactactcatcattctgacatcttatgcattcatcattgtcaccaccttgaagatgccttcagccagtgggcaccgcaaagtcttctccacctgtgcctcccacctgactgccatcaccatcttccatggcaccatcctcttcctctactgtgtacccaactccaaaaactccaggcacacagtcaaagtggcctctgtgttttacaccgtggtgatccccttgttgaatcccctgatctacagtctgaggaacaaagaagttaaaaaggccataaagaggttgttcaagagaaagtgctgcaggagaaggtgagcggccgc

SEQ ID NO: 537 - DNA, 1115 bp, synthetic construct
  source 1..1115: mol_type = other DNA; note = mmLucy-FLAG-rho-OR5D18(N136D)
ggatccgccaccatgagccaccagatcctgctgctcctggccctgctgaccctaggcctggctgattacaaggacgacgacgataagatcgaattgatgaacgggaccgagggcccaaacttctacgtgcctttctccaacaagacgggcgtggtggaattcatgctgctgactgatagaaatacaagtgggaccacgttcaccctcttgggcttctcagattacccagaactgcaagtcccactcttcctggtttttctggccatctacaatgtcactgtgctagggaatattgggttgattgtgatcatcaaaatcaaccccaaactgcatacccccatgtactttttcctcagccaactctcctttgtggatttctgctattcctccatcattgctcccaagatgttggtgaaccttgttgtcaaagacagaaccatttcatttttaggatgcgtagtacaattctttttcttctgtacctttgtggtcactgaatcctttttattagctgtgatggcctatgaccgcttcgtggccatttgcaaccctctgctctacacagttgacatgtcccagaaactctgcgtgctgctggttgtgggatcctatgcctggggagtctcatgttccttggaactgacgtgctctgctttaaagttatgttttcatggtttcaacacaatcaatcacttcttctgtgagttctcctcactactctccctttcttgctctgatacttacatcaaccagtggctgctattctttcttgccacctttaatgaaatcagcacactactcatcgttctcacatcttatgcgttcattgttgtaaccatcctcaagatgcgttcagtcagtgggcgccgcaaagccttctccacctgtgcctcccacctgactgccatcaccatcttccatggcaccatcctcttcctttactgtgtgcccaactccaaaaactccaggcacacagtcaaagtggcctctgtgttttacaccgtggtgatccccatgttgaatcccctgatctacagtctgaggaacaaagaagttaaaaaggccataaagaggttgttcaagagaaagtgctgcaggagaaggtgagcggccgc

SEQ ID NO: 538 - DNA, 1112 bp, synthetic construct
  source 1..1112: mol_type = other DNA; note = mmLucy-FLAG-rho-OR5F1
ggatccgccaccatgagccaccagatcctgctgctcctggccctgctgaccctaggcctggctgattacaaggacgacgacgataagatcgaattgatgaacgggaccgagggcccaaacttctacgtgcctttctccaacaagacgggcgtggtggaattcatgaccagaaaaaattatacctcactgactgagttcgtcctattgggattagcagacacgctggagctacagattatcctctttttgttttttcttgtgatttatacacttacagtactgggaaatctcgggatgatcctcttaatcaggatcgattcccagcttcacacacccatgtatttcttcctggctaacctgtcctttgtggacgtttgtaactcaactaccatcaccccaaagatgctggcagatttattatcagagaagaaaaccatctcttttgctggctgcttcctacagatgtacttctttatctccctggcgacaaccgaatgcatcctctttgggttaatggcctatgacaggtatgcggccatatgtcgcccgctgctttactccttgatcatgtccaggaccgtctacctaaaaatggcagccggggcttttgctgcagggttgctgaacttcatggtcaacacaagccatgtcagcagcttgtcattctgtgactccaatgtcatccatcacttcttctgtgacagtcccccacttttcaagctctcttgttctgacacaatcctgaaagaaagcataagttctattttggctggtgtgaatattgtggggactctgcttgtcatcctctcctcctactcctacgttctcttctccattttttctatgcattcgggggaggggaggcacagagctttctccacgtgtgcctctcacctgacagccataattctgttctatgccacctgcatctatacttacctgagacctagttccagctactccctgaatcaggacaaagtggcttctgtgttctacacagtggtgattcccatgttgaatcctctgatctacagcctcaggaacaaagaagttaaaaaggccataaagaggttgttcaagagaaagtgctgcaggagaaggtgagcggccgc

SEQ ID NO: 539 - DNA, 1112 bp, synthetic construct
  source 1..1112: mol_type = other DNA; note = mmLucy-FLAG-rho-OR5H1
ggatccgccaccatgagccaccagatcctgctgctcctggccctgctgaccctaggcctggctgattacaaggacgacgacgataagatcgaattgatgaacgggaccgagggcccaaacttctacgtgcctttctccaacaagacgggcgtggtggaattcatggaagaggaaaatgcaacattgctgacagagtttgttctcacaggatttttatatcaaccacagtggaaaatacccctgttcctggcattcttggtaatatatctcatcaccatcatggggaatcttggtctgattgctgtcatctggaaagaccctcaccttcatatcccaatgtacttactccttgggaatttagcttttgtggatgcttggatatcatccacagtgaccccaaagatgctgaataacttcttagctaagagtaagatgatatctctctctgaatgcaagatacagtttttttcgtttgcaatcagtgtaaccacggaatgttttctcttggcaacgatggcatatgatcgctatgtagccatatgcaaacctttactttatccagccattatgaccaatggactgtgcatccggctattaatcttgtcatatgtaggtggtattcttcatgctttaatccatgaaggatttttattcagactaaccttctgtaactccaacatagtacatcacatttactgtgacactatcccattgtctaagatttcttgtactgattcttctattaattttctaatggtttttattttctcaggttcaattcaggtattcagcattgtgactattcttgtatcttatacatttgttctcttcgcaatcttaaaaaagaaatctgataaaggtgtaaggaaagccttttccacctgtggagcccatctcttctctgtctctttatactatggaccccttctcttcatttatgtgggccctgcatctccgcaagcagatgatcaagatatggtggagcctctattctacactgtcatcattcctttgttaaatcctatcatctacagtctgaggaacaaagaagttaaaaaggccataaagaggttgttcaagagaaagtgctgcaggagaaggtgagcggccgc

SEQ ID NO: 540 - DNA, 1112 bp, synthetic construct
  source 1..1112: mol_type = other DNA; note = mmLucy-FLAG-rho-OR5H14
ggatccgccaccatgagccaccagatcctgctgctcctggccctgctgaccctaggcctggctgattacaaggacgacgacgataagatcgaattgatgaacgggaccgagggcccaaacttctacgtgcctttctccaacaagacgggcgtggtggaattcatggaagaggaaaatgcaacattgctgacagagtttgttctcacaggatttttatatcaaccacagtggaaaatacccctgttcctggcattcttggtaatatatctcatcaccatcatggggaatcttggtctgattgctgtcatctggaaagaccctcatcttcatatcccaatgtacttactccttgggaatttagcttttgtggatgctttgttatcatcctcagtgactctgaagatgctgatcaacttcttagctaagagtaagatgatatctctctctgaatgcaagatacagttgttttcgtttgcaatcagtgtaaccacggaatgttttctcttggcaacaatggcatatgatcgctatgtagccatatgcaaacccttactttatccagccattatgaccaatggactgtgcatccggctattaatcttgtcatatgtaggtggtcttcttcatgctttaatccatgaaggatttttattcagactaaccttctgtaactccaacataatacaacacttttactgtgacattatcccattgttaaagatttcttatactgattcctctattaactttctaatggtttttatttttgcaggttcaattcaagtttttaccatagggactgttcttatatcttacatatttgtcctctatacaatcttgaaaaagaagtctgtcaaaggtatgagaaaagccttctccacctgtggagctcatctcttatctgtatctttatactatgggcccctcgccttcatgtatatgggctctgcatccccacaggctgatgaccaagatatgatggagtctctattttacactgtcatagttcctttattaaatcccatgatctacagcctgaggaacaaagaagttaaaaaggccataaagaggttgttcaagagaaagtgctgcaggagaaggtgagcggccgc

SEQ ID NO: 541 - DNA, 1112 bp, synthetic construct
  source 1..1112: mol_type = other DNA; note = mmLucy-FLAG-rho-OR5H14(G64R,Y189C)
ggatccgccaccatgagccaccagatcctgctgctcctggccctgctgaccctaggcctggctgattacaaggacgacgacgataagatcgaattgatgaacgggaccgagggcccaaacttctacgtgcctttctccaacaagacgggcgtggtggaattcatggaagaggaaaatgcaacattgctgacagagtttgttctcacaggatttttatatcaaccacagtggaaaatacccctgttcctggcattcttggtaatatatctcatcaccatcatggggaatcttggtctgattgctgtcatctggaaagaccctcatcttcatatcccaatgtacttactccttaggaatttagcttttgtggatgctttgttatcatcctcagtgactctgaagatgctgatcaacttcttagctaagagtaagatgatatctctctctgaatgcaagatacagttgttttcgtttgcaatcagtgtaaccacggaatgttttctcttggcaacaatggcatatgatcgctatgtagccatatgcaaacccttactttatccagccattatgaccaatggactgtgcatccggctattaatcttgtcatatgtaggtggtcttcttcatgctttaatccatgaaggatttttattcagactaaccttctgtaactccaacataatacaacacttttactgtgacattatcccattgttaaagatttcttgtactgattcctctattaactttctaatggtttttatttttgcaggttcaattcaagtttttaccatagggactgttcttatatcttacatatttgtcctctatacaatcttgaaaaagaagtctgtcaaaggtatgagaaaagccttctccacctgtggagctcatctcttatctgtatctttatactatgggcccctcgccttcatgtatatgggctctgcatccccacaggctgatgaccaagatatgatggagtctctattttacactgtcatagttcctttattaaatcccatgatctacagcctgaggaacaaagaagttaaaaaggccataaagaggttgttcaagagaaagtgctgcaggagaaggtgagcggccgc

SEQ ID NO: 542 - DNA, 1112 bp, synthetic construct
  source 1..1112: mol_type = other DNA; note = mmLucy-FLAG-rho-OR5H15
ggatccgccaccatgagccaccagatcctgctgctcctggccctgctgaccctaggcctggctgattacaaggacgacgacgataagatcgaattgatgaacgggaccgagggcccaaacttctacgtgcctttctccaacaagacgggcgtggtggaattcatggaagaggaaaatgcaacattgctgacagagtttgttctcacaggatttttatatcaaccacagtggaaaatacccctgttcttggcattcttggtaatatatctcatcaccatcatggggaatcttggtctgattgctgtcatctggaaagaccctcaccttcatatcccaatgtacttactccttgggaatttagcttttgtggatgcttggatatcatccacagtgaccccaaagatgctgaataacttcttagctaagagtaagatgatatctctctctgaatgcaagatacaatttttttccattgcaattggcgtaaccacagaatgttttctcttggcaacaatggcatatgatcgctatgtagccatatgcaaacctttactttatccagccattatgaccaatggactgtgcatccggctattaatcttgtcatatatagctggtattcttcatgctttaatccatgaaggatttttattcagactaaccttctgtaactccaacatagtacatcacatttactgtgacactatcccattgtctaagatttcttgtactgattcttctattaattttctaatggtttttattttctcaggttcaattcaggtattcagcattgtgactattcttatatcttacacatttgttctcttcacagtcttagaaaagaaatctgataagggtgtaaggaaagccttttccacctgtggagcccatctcttctctgtctgtttatactatggcccccttctcttaatgtatgtgggccctgcatctccgcaagcagatggtcaaaatatggtggagcctctattctacactgtcatcattcctttgttaaatcctatcatctacagtctgaggaacaaagaagttaaaaaggccataaagaggttgttcaagagaaagtgctgcaggagaaggtgagcggccgc

SEQ ID NO: 543 - DNA, 1112 bp, synthetic construct
  source 1..1112: mol_type = other DNA; note = mmLucy-FLAG-rho-OR5H15(V108I,S148T,T167S,P165L)
ggatccgccaccatgagccaccagatcctgctgctcctggccctgctgaccctaggcctggctgattacaaggacgacgacgataagatcgaattgatgaacgggaccgagggcccaaacttctacgtgcctttctccaacaagacgggcgtggtggaattcatggaagaggaaaatgcaacattgctgacagagtttgttctcacaggatttttatatcaaccacagtggaaaatacccctgttcttggcattcttggtaatatatctcatcaccatcatggggaatcttggtctgattgctgtcatctggaaagaccctcaccttcatatcccaatgtacttactccttgggaatttagcttttgtggatgcttggatatcatccacagtgaccccaaagatgctgaataacttcttagctaagagtaagatgatatctctctctgaatgcaagatacaatttttttccattgcaattggcataaccacagaatgttttctcttggcaacaatggcatatgatcgctatgtagccatatgcaaacctttactttatccagccattatgaccaatggactgtgcatccggctattaatcttgacatatatagctggtattcttcatgctttaatccatgaaggatttttattcagactatccttctgtaactccaacatagtacatcacatttactgtgacactatcccattgtctaagatttcttgtactgattcttctattaattttctaatggtttttattttctcaggttcaattcaggtattcagcattgtgactattcttatatcttacacatttgttctcttcacagtcttagaaaagaaatctgataagggtgtaaggaaagccttttccacctgtggagcccatctcttctctgtctgtttatactatggcccccttctcttaatgtatgtgggccctgcatctctgcaagcagatggtcaaaatatggtggagcctctattctacactgtcatcattcctttgttaaatcctatcatctacagtctgaggaacaaagaagttaaaaaggccataaagaggttgttcaagagaaagtgctgcaggagaaggtgagcggccgc

SEQ ID NO: 544 - DNA, 1112 bp, synthetic construct
  source 1..1112: mol_type = other DNA; note = mmLucy-FLAG-rho-OR5H2
ggatccgccaccatgagccaccagatcctgctgctcctggccctgctgaccctaggcctggctgattacaaggacgacgacgataagatcgaattgatgaacgggaccgagggcccaaacttctacgtgcctttctccaacaagacgggcgtggtggaattcatggaacaggataatacaacattgctgacagagtttgttctcacaggacttacatatcagccagagtggaaaatgcccctgttcttggtgttcttggtgatctatctcatcactattgtgtggaaccttggtctgattgctcttatctggaatgacccacaacttcacatccccatgtacttttttcttgggagtttagcctttgttgatgcttggatatcttccacagtaactcccaaaatgttggttaatttcttggccaaaaacaggatgatatctctgtctgaatgcatgattcaatttttttcctttgcatttggtggaactacagaatgttttctcttggcaacaatggcatatgatcgctatgtagccatatgcaaacctttactatatccagtgattatgaacaattcactatgcatacggctgttagccttctcatttttaggtggcttcctccatgccttaattcatgaagtccttatattcagattaaccttctgcaattctaacataatacatcatttttactgtgatattataccactgtttatgatttcctgtactgacccttctattaattttctaatggtttttattttgtctggctcaattcaggtattcaccattgtgacagttcttaattcttacacatttgctcttttcacaatcctaaaaaagaagtctgttagaggcgtaaggaaagccttttccacctgtggagcccatctcttatctgtctctttatattatggcccacttatcttcatgtatttgcgccctgcatctccacaagcagatgaccaagatatgatagactctgtcttttatacaatcataattcctttgctaaatcccattatctacagtctgaggaacaaagaagttaaaaaggccataaagaggttgttcaagagaaagtgctgcaggagaaggtgagcggccgc

SEQ ID NO: 545 - DNA, 1112 bp, synthetic construct
  source 1..1112: mol_type = other DNA; note = mmLucy-FLAG-rho-OR5H6(A129P,C179R,T256A,D269N)
ggatccgccaccatgagccaccagatcctgctgctcctggccctgctgaccctaggcctggctgattacaaggacgacgacgataagatcgaattgatgaacgggaccgagggcccaaacttctacgtgcctttctccaacaagacgggcgtggtggaattcatggaagaggaaaatgcaacattgctgacagagtttgttctcacaggatttttacatcaacctgactgtaaaataccgctcttcctggcattcttggtaatatatctcatcaccatcatggggaatcttggtctaattgttctcatctggaaagaccctcaccttcatatcccaatgtacttattccttgggagtttagcctttgtggatgcttcgttatcatccacagtgactccgaagatgctgatcaacttcttagctaagagtaagatgatatctctctctgaatgcatggtacaatttttttcccttgtaaccactgtaaccacagaatgttttctcttggcaacaatggcatatgatcgctatgtagccatttgcaaacctttactttatccagtcattatgaccaatgaactatgcattcagctattagtcttgtcatttataggtggccttcttcatgctttaatccatgaagctttttcattcagattaaccttctgtaattccaacataatacaacacttttaccgtgacattatcccattgttaaagatttcctgtactgattcctctattaactttctaatggtttttattttcgcaggttctgttcaagtttttaccattggaactattcttatatcttatacaattatcctctttacaatcttagaaaagaagtctatcaaagggatacgaaaagctgtctccacctgtggggctcatctcttatctgtatctttatactatggccccctcgccttcaaatatctgggctctgcatctccgcaagcagataaccaagatatgatggagtctctattttacactgtcatagttcctttattaaatcccatgatctacagcctgaggaacaaagaagttaaaaaggccataaagaggttgttcaagagaaagtgctgcaggagaaggtgagcggccgc

SEQ ID NO: 546 - DNA, 1118 bp, synthetic construct
  source 1..1118: mol_type = other DNA; note = mmLucy-FLAG-rho-OR5I1
ggatccgccaccatgagccaccagatcctgctgctcctggccctgctgaccctaggcctggctgattacaaggacgacgacgataagatcgaattgatgaacgggaccgagggcccaaacttctacgtgcctttctccaacaagacgggcgtggtggaattcatggaatttacagatagaaactacacgttggtcactgagtttattctattaggttttccaactcgccctgaactgcagattgtcctgttcctcatgtttctgacattgtatgctataattctgatagggaacattggattgatgctgttgatcaggattgatcctcaccttcaaacccccatgtattttttccttagcaacctatcatttgtagacctttgctatttctcagacattgttcccaaaatgctggtcaatttcctctcggagaacaaatctatttcctattatgggtgtgccctgcagttttattttttctgtacttttgcagatacagaatccttcatcctggccgccatggcctatgatcgctatgtcgccatctgtaaccctttattgtacacagttgtgatgtctaggggcatctgtatgcggttgattgtcttgtcataccttggaggcaacatgagttccctggttcacacatcctttgcctttattctgaaatattgtgacaaaaatgttattaatcattttttctgtgacctccctcccctgcttaaactatcctgcactgacacaacaattaatgagtggctcctctccacatacggcagctcagtggaaatcatttgttttatcatcatcatcatctcctactttttcattcttctctcagtcttaaagatccgctctttcagtgggaggaagaagaccttttctacatgcgcctctcacctgacttcagtgacgatctaccaagggactctcctctttatttactcacggcccagctacctgtattctccaaacactgataaaattatctcagtgttctacaccattttcattccagtgctgaatccgttgatttatagtttgaggaacaaagaagttaaaaaggccataaagaggttgttcaagagaaagtgctgcaggagaaggtgagcggccgc

SEQ ID NO: 547 - DNA, 1112 bp, synthetic construct
  source 1..1112: mol_type = other DNA; note = mmLucy-FLAG-rho-OR5J2
ggatccgccaccatgagccaccagatcctgctgctcctggccctgctgaccctaggcctggctgattacaaggacgacgacgataagatcgaattgatgaacgggaccgagggcccaaacttctacgtgcctttctccaacaagacgggcgtggtggaattcatggctgatgataattttacagttgtcactgagtttattcttttgggattgacagatcatgctgaactaaaagctgtgctttttgtggtgttcctggtgatttacgccattaccttgttgaggaatctgggcatgatcctcttaatccaaatcacctccaaactccacacacccatgtactttttactcagctgtctttcatttgtggatgcctgctattcatctgcaattgcacccaaaatgctggtgaacctcctggttgtgaaggcaacaatttctttctctgcttgcatggtacagcatttgtgtttcggagtgttcatcaccacagaaggcttcttactgtcagtgatggcctatgaccgctatgtggccattgtgagtcccttgctttacactgtagccatgtctgatagaaagtgtgtggagcttgtcacaggatcatggataggtggaatagttaacacattaatccacacaatcagcttgaggagactgtccttttgtaggctaaatgctgtcagccacttcttctgtgacattccttcactgctaaagctgtcatgttctgacacctccatgaatgagttgttgctgttaaccttctccggagtcattgccatggccaccttcttgactgtgatcatttcctacatcttcattgcttttgctagcctaaggatccactcagcatcaggcagacagcaagccttctccacctgtgcctctcacctgactgctgtgaccatattctatggtaccttaatctttagctacattcagccaagctcccagtattttgtggaacaagagaaagtggtttctatgttctatacgctagggattcccatgttaaacctgttgatacacagtttgaggaacaaagaagttaaaaaggccataaagaggttgttcaagagaaagtgctgcaggagaaggtgagcggccgc

SEQ ID NO: 548 - DNA, 1112 bp, synthetic construct
  source 1..1112: mol_type = other DNA; note = mmLucy-FLAG-rho-OR5K1
ggatccgccaccatgagccaccagatcctgctgctcctggccctgctgaccctaggcctggctgattacaaggacgacgacgataagatcgaattgatgaacgggaccgagggcccaaacttctacgtgcctttctccaacaagacgggcgtggtggaattcatggctgaagaaaatcataccatgaaaaatgagtttatcctcacaggatttacagatcaccctgagctgaagactctgctgtttgtggtgttctttgccatctatctgatcaccgtggtggggaatattagtttggtggcactgatatttacacaccgtcggcttcacacaccaatgtacatctttctgggaaatctggctcttgtggattcttgctgtgcctgtgctattacccccaaaatgttagagaacttcttttctgagaacaaaaggatttccctctatgaatgtgcagtacagttttattttctttgcactgtggaaactgcagactgctttcttctggcagcaatggcctatgaccgctatgtggccatatgcaacccactgcagtaccacatcatgatgtccaagaaactctgcattcagatgaccacaggggccttcatagctggaaacctgcattccatgattcatgtagggcttgtatttaggttagttttctgtggatcgaatcacatcaaccacttttactgtgatattcttcccttgtatagactctcttgtgttgatccttatatcaatgaactggttctattcatcttctcaggttcagttcaagtctttaccataggtagtgtcttaatatcttatctctatattcttcttactattttcaaaatgaaatccaaagagggaagggccaaagctttttctacctgtgcatcccactttttgtcagtttcattattctatggatctcttttcttcatgtacgttagaccaaatttgcttgaagaaggggataaagatataccagctgcaattttatttacaatagtagttcccttactaaatcctttcatttatagcctgaggaacaaagaagttaaaaaggccataaagaggttgttcaagagaaagtgctgcaggagaaggtgagcggccgc

SEQ ID NO: 549 - DNA, 1112 bp, synthetic construct
  source 1..1112: mol_type = other DNA; note = mmLucy-FLAG-rho-OR5K2
ggatccgccaccatgagccaccagatcctgctgctcctggccctgctgaccctaggcctggctgattacaaggacgacgacgataagatcgaattgatgaacgggaccgagggcccaaacttctacgtgcctttctccaacaagacgggcgtggtggaattcatggttgaagaaaatcataccatgaaaaatgagtttatcctcacaggatttacagatcaccctgagctgaagactctgctgtttgtggtgttctttgccatctatctgatcaccgtggtggggaatattagtttggtggcactgatatttacacactgtcggcttcacacaccaatgtacatctttctgggaaatctggctcttgtggattcttgctgtgcctgtgctattacccccaaaatgttagagaacttcttttctgagggcaaaaggatttccctctatgaatgtgcagtacagttttattttctttgcactgtggaaactgcagactgctttcttctggcagcagtggcctatgaccgctatgtggccatctgcaacccactgcagtaccacatcatgatgtccaagaaactctgcattcagatgaccacaggcgccttcatagctggaaatctgcattccatgattcatgtagggcttgtatttaggttagttttctgtggattgaatcacatcaaccacttttactgtgatactcttcccttgtatagactctcctgtgttgaccctttcatcaatgaactggttctattcatcttctcaggttcagttcaagtctttaccataggtagtgtcttaatatcttatctctatattcttcttactattttcagaatgaaatccaaggagggaagggccaaagccttttctacttgtgcatcccacttttcatcagtttcattattctatggatctatttttttcctatacattagaccaaatttgcttgaagaaggaggtaatgatataccagctgctattttatttacaatagtagttcccttactaaatcctttcatttatagtctgaggaacaaagaagttaaaaaggccataaagaggttgttcaagagaaagtgctgcaggagaaggtgagcggccgc

SEQ ID NO: 550 - DNA, 1106 bp, synthetic construct
  source 1..1106: mol_type = other DNA; note = mmLucy-FLAG-rho-OR5K3
ggatccgccaccatgagccaccagatcctgctgctcctggccctgctgaccctaggcctggctgattacaaggacgacgacgataagatcgaattgatgaacgggaccgagggcccaaacttctacgtgcctttctccaacaagacgggcgtggtggaattcatgaataaggagaatcactccttgatagctgagttcatcctcacaggatttacatatcatccaaagctgaagactgttctgtttgtggtgttctttgccatctatctgatcaccatggtggggaacattggtttggtggcattgatttatatagagcaacgtcttcacacaccaatgtacatatttttaggcaacctagttctgatggattcctgctgttcctctgctattactcccaagatgttagagaacttcttttctgaggacaaaaggattaccctgtatgaatgtatggcacaattttattttctctgtcttgctgaaactacagactgctttcttctggcggcaatggcctatgactgctatgtggccatatgcaacccactgcagtaccacaccatgatgtccaagacactctgcattcagatgactgcaggagcctacctagctggcaacctgcatcccatgattgaagtagagtttctgttgaggttaactttctgtgggtctcatcaaatcaatcattttttctgtgatgttcttccattatatagactttcttgtattaacccttatatcaatgaattggtgttatttatcttggcaggatcaattcaaatctttactatagtcttagtttcttatttctacatccttttcacaatatttacaatgaaatccaaggagggaagaggcaaagctttatctacttgtgcatctcactttctctctgtgtcaatattctgtgattcccttctcttcatgtatgctcgaccaggtgcagttaatgaaggggataaagatatacctgttgctatattttatactttagttattcctttattaaatccttttatttatagcctaaggaacaaagaagttaaaaaggccataaagaggttgttcaagagaaagtgctgcaggagaaggtgagcggccgc

SEQ ID NO: 551 - DNA, 1103 bp, synthetic construct
  source 1..1103: mol_type = other DNA; note = mmLucy-FLAG-rho-OR5K4
ggatccgccaccatgagccaccagatcctgctgctcctggccctgctgaccctaggcctggctgattacaaggacgacgacgataagatcgaattgatgaacgggaccgagggcccaaacttctacgtgcctttctccaacaagacgggcgtggtggaattcatggctagggaaaatcactccttagcagctgaattcatcctcataggatttacaaattatccagagctgaagacgcttctgtttgtggtgttctctgccatctatctggtcaccatggtggggaatcttggtctggtggcattaatttatgtagagcgtcgtcttctcacaccaatgtacatctttctgggcaacctggctctgatggattcctgctgttcctgtgctgttacccccaagatgttagagaatttcttttctgaggatagaattatttccctgtatgaatgtatggcacaattttattttctctgtcttgctgaaaccacagactgctttcttctggcgacaatggcctatgaccgctatgtggccatatgccacccactgcagtaccacaccatgatgtccaagacgctctgcattcggatgaccacaggggccttcaaagctggaaacctgcattccatgattcatgtagggcttttattaaggttaactttctgcaggtctaataaaattcaccactttttctgtgatattcttccactgtatagactctcctgtacagatccttctattaatgaactaatgatatatatcttttcaataccaattcaaatctttaccattgctactgtcttgatctcttatctctgcatccttttgactgttttcaaaatgaaatccaaggagggaagaggtaaagcattttctacctgtgcatcccactttctctctgtctcaatattttacatttgtcttctcatgtatattggaccatctgaagaaggagataaagatacaccagtggcaatattttatgcaatagtaatcccattactaaacccttttatttatagtctgaggaacaaagaagttaaaaaggccataaagaggttgttcaagagaaagtgctgcaggagaaggtgagcggccgc

SEQ ID NO: 552 - DNA, 1112 bp, synthetic construct
  source 1..1112: mol_type = other DNA; note = mmLucy-FLAG-rho-OR5L1
ggatccgccaccatgagccaccagatcctgctgctcctggccctgctgaccctaggcctggctgattacaaggacgacgacgataagatcgaattgatgaacgggaccgagggcccaaacttctacgtgcctttctccaacaagacgggcgtggtggaattcatgggcaaggaaaactgcaccactgtggctgagttcattctccttggactatcagatgtccctgagttgagagtctgcctcttcctgctgttccttctcatctatggagtcacgttgttagccaacctgggcatgattgcactgattcaggtcagctctcggctccacacccccatgtactttttcctcagccacttgtcctctgtagatttctgctactcctcaataattgtgccaaaaatgttggctaatatctttaacaaggacaaagccatctccttcctagggtgcatggtgcaattctacttgttttgcacttgtgtggtcactgaggtcttcctgctggccgtgatggcctatgaccgctttgtggccatctgtaaccctttgctatacacagtcaccatgtcttggaaggtgcgtgtggagctggcttcttgctgctacttctgtgggacggtgtgttctctgattcatttgtgcttagctcttaggatccccttctatagatctaatgtgattaaccactttttctgtgatctacctcctgtcttaagtcttgcttgctctgatatcactgtgaatgagacactgctgttcctggtggccactttgaatgagagtgttaccatcatgatcatcctcacctcctacctgctaattctcaccaccatcctgaagatgggctctgcagagggcaggcacaaagccttctccacctgtgcttcccacctcacagctatcactgtcttccatggaacagtcctttccatttattgcaggcccagttcaggcaatagtggagatgctgacaaagtggccaccgtgttctacacagtcgtgattcctatgctgaactctgtgatctacagcctgaggaacaaagaagttaaaaaggccataaagaggttgttcaagagaaagtgctgcaggagaaggtgagcggccgc

SEQ ID NO: 553 - DNA, 1112 bp, synthetic construct
  source 1..1112: mol_type = other DNA; note = mmLucy-FLAG-rho-OR5L2
ggatccgccaccatgagccaccagatcctgctgctcctggccctgctgaccctaggcctggctgattacaaggacgacgacgataagatcgaattgatgaacgggaccgagggcccaaacttctacgtgcctttctccaacaagacgggcgtggtggaattcatgggcaaggaaaactgcaccactgtggctgagttcattctccttggactatcagatgtccctgagttgagagtctgcctcttcctgctgttccttctcatctatggagtcacgttgttagccaatctgggcatgactgcactgattcaggtcagctctcggctccacacccccgtgtactttttcctcagccacttgtcctttgtagatttctgctactcctcaataattgtgccaaagatgttggctaatatctttaacaaggacaaagccatctccttcctagggtgcatggtgcaattctacttgttttgcacatgtggagtcactgaggtcttcctgctggccgtgatggcctatgaccgctttgtggccatctgtaaccccctgctgtacatggtgaccatgtctcagaagctgcgtgtggagctgacctcttgctgctacttctgtgggacggtgtgttctctgattcactcgtccttagctcttaggatcctcttctatagatctaatgtgattaaccacttcttctgtgatctaccccctctcctaagtcttgcttgctctgatgtcactgtgaatgagacactgctgttcctggtggccactttgaatgagagtgttaccatcatgatcatcctcacctcctacctgctaattctcaccactatcctgaagatacactctgcagagagcaggcacaaagctttctccacctgtgcctcccacctcacagccatcactgtctcccatggaacaatcctttacatttattgcaggccgagttcaggcaacagtggagatgttgacaaagtggccaccgtgttctacacagttgtgattcccatgctgaaccccctgatctacagcctgaggaacaaagaagttaaaaaggccataaagaggttgttcaagagaaagtgctgcaggagaaggtgagcggccgc

SEQ ID NO: 554 - DNA, 1112 bp, synthetic construct
  source 1..1112: mol_type = other DNA; note = mmLucy-FLAG-rho-OR5M1
ggatccgccaccatgagccaccagatcctgctgctcctggccctgctgaccctaggcctggctgattacaaggacgacgacgataagatcgaattgatgaacgggaccgagggcccaaacttctacgtgcctttctccaacaagacgggcgtggtggaattcatgttctccccaaaccacaccatagtgacagaattcattctcttgggactgacagacgacccagtgctagagaagatcctgtttggggtattccttgcgatctacctaatcacactggcaggcaacctgtgcatgatcctgctgatcaggaccaattcccacctgcaaacacccatgtatttcttccttggccacctctcctttgtagacatttgctattcttccaatgttactccaaatatgctgcacaatttcctctcagaacagaagaccatctcctacgctggatgcttcacacagtgtcttctcttcatcgccctggtgatcactgagttttacatccttgcttcaatggcattggatcgctatgtagccatttgcagccctttgcattacagttccaggatgtccaagaacatctgtgtctgtctggtcactatcccttacatgtatgggtttcttagtgggttctctcagtcactgctaacctttcacttatccttctgtggctcccttgaaatcaatcatttctactgcgctgatcctcctcttatcatgctggcctgctctgacacccgtgtcaaaaagatggcaatgtttgtagttgcaggctttaatctctcaagctctctcttcatcattcttctgtcctatcttttcatttttgcagcgatcttcaggatccgttctgctgaaggcaggcacaaagccttttctacgtgtgcttcccacctgacaatagtcactttgttttatggaaccctcttctgcatgtacgtaaggcctccatcagagaagtctgtagaggagtccaaaataactgcagtcttttatacttttttgagcccaatgctgaacccattgatctatagcctaaggaacaaagaagttaaaaaggccataaagaggttgttcaagagaaagtgctgcaggagaaggtgagcggccgc

SEQ ID NO: 555 - DNA, 1112 bp, synthetic construct
  source 1..1112: mol_type = other DNA; note = mmLucy-FLAG-rho-OR5M1(S282T)
ggatccgccaccatgagccaccagatcctgctgctcctggccctgctgaccctaggcctggctgattacaaggacgacgacgataagatcgaattgatgaacgggaccgagggcccaaacttctacgtgcctttctccaacaagacgggcgtggtggaattcatgttctccccaaaccacaccatagtgacagaattcattctcttgggactgacagacgacccagtgctagagaagatcctgtttggggtattccttgcgatctacctaatcacactggcaggcaacctgtgcatgatcctgctgatcaggaccaattcccacctgcaaacacccatgtatttcttccttggccacctctcctttgtagacatttgctattcttccaatgttactccaaatatgctgcacaatttcctctcagaacagaagaccatctcctacgctggatgcttcacacagtgtcttctcttcatcgccctggtgatcactgagttttacatccttgcttcaatggcattggatcgctatgtagccatttgcagccctttgcattacagttccaggatgtccaagaacatctgtgtctgtctggtcactatcccttacatgtatgggtttcttagtgggttctctcagtcactgctaacctttcacttatccttctgtggctcccttgaaatcaatcatttctactgcgctgatcctcctcttatcatgctggcctgctctgacacccgtgtcaaaaagatggcaatgtttgtagttgcaggctttaatctctcaagctctctcttcatcattcttctgtcctatcttttcatttttgcagcgatcttcaggatccgttctgctgaaggcaggcacaaagccttttctacgtgtgcttcccacctgacaatagtcactttgttttatggaaccctcttctgcatgtacgtaaggcctccatcagagaagtctgtagaggagtccaaaataactgcagtcttttatacttttttgaccccaatgctgaacccattgatctatagcctaaggaacaaagaagttaaaaaggccataaagaggttgttcaagagaaagtgctgcaggagaaggtgagcggccgc

SEQ ID NO: 556 - DNA, 1112 bp, synthetic construct
  source 1..1112: mol_type = other DNA; note = mmLucy-FLAG-rho-OR5M10
ggatccgccaccatgagccaccagatcctgctgctcctggccctgctgaccctaggcctggctgattacaaggacgacgacgataagatcgaattgatgaacgggaccgagggcccaaacttctacgtgcctttctccaacaagacgggcgtggtggaattcatgttgtccccaaaccacaccatagtgacagaattcattctcttaggactgacagacgacccagtgctagagaagatcctgtttggggtgttcctggcgatctacctaatcacactggcaggcaacctgtgcatgatcctgctgatcaggaccaattcccaactgcaaacacccatgtatttcttccttggtcacctctcctttgtagacatttgctattcttccaatgttactccaaatatgctgcacaatttcctctcagaacagaagaccatctcctacgctggatgcttcacacagtgtcttctcttcatcgccctagtgatcactgagttttacttccttgcttcaatggcattggatcgctatgtagccatttgcagccctttacattacagttccaggatgtccaagaacatttgcatctctctggtcactgtgccttacatgtatggcttccttaatgggctctctcagacactgctgacctttcacttatccttctgtggctcccttgaaatcaatcatttctactgcgctgatcctcctcttatcatgctggcctgctctgacacccgtgtcaaaaagatggcaatgtttgtagttgcaggctttactctctcaagctctctcttcatcattcttctgtcctatcttttcatttttgcagcgatcttcaggatccgttctgctgaaggcaggcacaaagccttttctacgtgtgcttcccacctgacaatagtcactttgttttatggaaccctcttctgcatgtacgtaaggcctccatcagagaagtctgtagaggagtccaaaataattgcagtcttttatacttttttgagcccaatgctgaacccattgatctatagcctaaggaacaaagaagttaaaaaggccataaagaggttgttcaagagaaagtgctgcaggagaaggtgagcggccgc

SEQ ID NO: 557 - DNA, 1109 bp, synthetic construct
  source 1..1109: mol_type = other DNA; note = mmLucy-FLAG-rho-OR5M11
ggatccgccaccatgagccaccagatcctgctgctcctggccctgctgaccctaggcctggctgattacaaggacgacgacgataagatcgaattgatgaacgggaccgagggcccaaacttctacgtgcctttctccaacaagacgggcgtggtggaattcatgtccaacacaaatggcagtgcaatcacagaattcattttacttgggctcacagattgcccggaactccagtctctgctttttgtgctgtttctggttgtttacctcgtcaccctgctaggcaacctgggcatgataatgttaatgagactggactctcgccttcacacgcccatgtacttcttcctcactaacttagcctttgtggatttgtgctatacatcaaatgcaaccccgcagatgtcgactaatatcgtatctgagaagaccatttcctttgctggttgctttacacagtgctacattttcattgcccttctactcactgagttttacatgctggcagcaatggcctatgaccgctatgtggccatatatgaccctctgcgctacagtgtgaaaacgtccaggagagtttgcatctgcttggccacatttccctatgtctatggcttctcagatggactcttccaggccatcctgaccttccgcctgaccttctgtagatccagtgtcatcaaccacttctactgtgctgacccgccgctcattaagctttcttgttctgatacttatgtcaaagagcatgccatgttcatatctgctggcttcaacctctccagctccctcaccatcgtcttggtgtcctatgccttcattcttgctgccatcctccggatcaaatcagcagagggaaggcacaaggcattctccacctgtggttcccatatgatggctgtcaccctgttttatgggactctcttttgcatgtatataagaccaccaacagataagactgttgaggaatctaaaataatagctgtcttttacacctttgtgagtccggtacttaatccattgatctacagtctgaggaacaaagaagttaaaaaggccataaagaggttgttcaagagaaagtgctgcaggagaaggtgagcggccgc

SEQ ID NO: 558 - DNA, 1109 bp, synthetic construct
  source 1..1109: mol_type = other DNA; note = mmLucy-FLAG-rho-OR5M11(S171N)
ggatccgccaccatgagccaccagatcctgctgctcctggccctgctgaccctaggcctggctgattacaaggacgacgacgataagatcgaattgatgaacgggaccgagggcccaaacttctacgtgcctttctccaacaagacgggcgtggtggaattcatgtccaacacaaatggcagtgcaatcacagaattcattttacttgggctcacagattgcccggaactccagtctctgctttttgtgctgtttctggttgtttacctcgtcaccctgctaggcaacctgggcatgataatgttaatgagactggactctcgccttcacacgcccatgtacttcttcctcactaacttagcctttgtggatttgtgctatacatcaaatgcaaccccgcagatgtcgactaatatcgtatctgagaagaccatttcctttgctggttgctttacacagtgctacattttcattgcccttctactcactgagttttacatgctggcagcaatggcctatgaccgctatgtggccatatatgaccctctgcgctacagtgtgaaaacgtccaggagagtttgcatctgcttggccacatttccctatgtctatggcttctcagatggactcttccaggccatcctgaccttccgcctgaccttctgtagatccaatgtcatcaaccacttctactgtgctgacccgccgctcattaagctttcttgttctgatacttatgtcaaagagcatgccatgttcatatctgctggcttcaacctctccagctccctcaccatcgtcttggtgtcctatgccttcattcttgctgccatcctccggatcaaatcagcagagggaaggcacaaggcattctccacctgtggttcccatatgatggctgtcaccctgttttatgggactctcttttgcatgtatataagaccaccaacagataagactgttgaggaatctaaaataatagctgtcttttacacctttgtgagtccggtacttaatccattgatctacagtctgaggaacaaagaagttaaaaaggccataaagaggttgttcaagagaaagtgctgcaggagaaggtgagcggccgc

SEQ ID NO: 559 - DNA, 1106 bp, synthetic construct
  source 1..1106: mol_type = other DNA; note = mmLucy-FLAG-rho-OR5M3
ggatccgccaccatgagccaccagatcctgctgctcctggccctgctgaccctaggcctggctgattacaaggacgacgacgataagatcgaattgatgaacgggaccgagggcccaaacttctacgtgcctttctccaacaagacgggcgtggtggaattcatgctcaatttcaccgatgtgacagagttcattcttttggggctaacgagccgtcgagaatggcaagttctcttcttcatcatctttcttgtggtctacatcatcaccatggtgggcaatatcggcatgatggtgttaatcaaggtcagtcctcagcttaacaaccccatgtactttttcctcagtcacttgtcatttgttgatgtgtggttttcttccaatgtcacccctaaaatgttggaaaacctgttatcagataaaaaaacaattacttatgctggttgtttagtacagtgtttcttcttcattgctcttgtccatgtggaaatttttattcttgctgcgatggcctttgatagatacatggcaattgggaatcctctgctttatggcagtaaaatgtcaagggttgtctgtattcgactgattactttcccttacatttatggttttctgacgagtctggcagcaacattatggacttacggcttgtacttctgtggaaaaattgagatcaaccatttctactgtgcagatccacctctcatcaaaatggcctgtgctgggacctttgtaaaagaatatacaatgatcatacttgccggcattaacttcacatattccctgactgtaattatcatctcttacttattcatcctcattgccattctgcgaatgcgctcagcagaaggaaggcagaaggccttttccacatgtgggtcccatctgacagctgtcattatattctatggtactctgatcttcatgtatctcagacgtcccacagaggagtctgtggagcaggggaagatggtggctgtgttctataccacagtgatccccatgttgaatcccatgatctacagtctgaggaacaaagaagttaaaaaggccataaagaggttgttcaagagaaagtgctgcaggagaaggtgagcggccgc

SEQ ID NO: 560 - DNA, 1109 bp, synthetic construct
  source 1..1109: mol_type = other DNA; note = mmLucy-FLAG-rho-OR5M8
ggatccgccaccatgagccaccagatcctgctgctcctggccctgctgaccctaggcctggctgattacaaggacgacgacgataagatcgaattgatgaacgggaccgagggcccaaacttctacgtgcctttctccaacaagacgggcgtggtggaattcatgagaagaaactgcacgttggtgactgagttcattctcctgggactgaccagtcgccgggaattacaaattctcctcttcacgctgtttctggccatttacatggtcacggtggcagggaaccttggcatgattgtcctcatccaggccaacgcctggctccacatgcccatgtactttttcctgagccacttatccttcgtggatctgtgcttctcttccaatgtgactccaaagatgctggagattttcctttcagagaagaaaagcatttcctatcctgcctgtcttgtgcagtgttacctttttatcgccttggtccatgttgagatctacatcctggctgtgatggcctttgaccggtacatggccatctgcaaccctctgctttatggcagcagaatgtccaagagtgtgtgctccttcctcatcacggtgccttatgtgtatggagcgctcactggcctgatggagaccatgtggacctacaacctagccttctgtggccccaatgaaattaatcacttctactgtgcggacccaccactgattaagctggcttgttctgacacctacaacaaggagttgtcaatgtttattgtggctggctggaacctttctttttctctcttcatcatatgtatttcctacctttacattttccctgctattttaaagattcgctctacagagggcaggcaaaaagctttttctacctgtggctcccatctgacagctgtcactatattctatgcaacccttttcttcatgtatctcagacccccctcaaaggaatctgttgaacagggtaaaatggtagctgtattttataccacagtaatccctatgctgaaccttataatttatagccttaggaacaaagaagttaaaaaggccataaagaggttgttcaagagaaagtgctgcaggagaaggtgagcggccgc

SEQ ID NO: 561 - DNA, 1106 bp, synthetic construct
  source 1..1106: mol_type = other DNA; note = mmLucy-FLAG-rho-OR5M9
ggatccgccaccatgagccaccagatcctgctgctcctggccctgctgaccctaggcctggctgattacaaggacgacgacgataagatcgaattgatgaacgggaccgagggcccaaacttctacgtgcctttctccaacaagacgggcgtggtggaattcatgcctaatttcacggatgtgacagaatttactctcctggggctgacctgtcgtcaggagctacaggttctcttttttgtggtgttcctagcggtttacatgatcactctgttgggaaatattggtatgatcattttgattagcatcagtcctcagcttcagagtcccatgtactttttcctgagtcatctgtcttttgcggacgtgtgcttctcctccaacgttacccccaaaatgctggaaaacttattatcagagacaaaaaccatttcctatgtgggatgcttggtgcagtgctactttttcattgccgttgtccacgtggaggtctatatcctggctgtgatggcctttgacaggtacatggccggctgcaaccctctgctttatggcagtaaaatgtctaggactgtgtgtgttcggctcatctctgtgccttatgtctatggattctctgtcagcctaatatgcacactatggacttatggcttatacttctgtggaaactttgaaatcaatcacttctattgtgcagatccccctctcatccagattgcctgtgggagagtgcacatcaaagaaatcacaatgattgttattgctggaattaacttcacatattccctctcggtggtcctcatctcctacactctcattgtagtagctgtgctacgcatgcgctctgccgatggcaggaggaaggcgttctccacctgtgggtcccacttgacggctgtttctatgttttatgggacccccatcttcatgtatctcaggagacccactgaggaatccgtagagcagggcaaaatggtggctgtgttttacaccacagtaattcctatgttgaatcccatgatctacagtctgaggaacaaagaagttaaaaaggccataaagaggttgttcaagagaaagtgctgcaggagaaggtgagcggccgc

SEQ ID NO: 562 - DNA, 1100 bp, synthetic construct
  source 1..1100: mol_type = other DNA; note = mmLucy-FLAG-rho-OR5P2
ggatccgccaccatgagccaccagatcctgctgctcctggccctgctgaccctaggcctggctgattacaaggacgacgacgataagatcgaattgatgaacgggaccgagggcccaaacttctacgtgcctttctccaacaagacgggcgtggtggaattcatgaattccctgaaggacgggaatcacaccgctctgacggggttcatcctattgggcttaacagatgatccaatccttcgagtcatcctcttcatgatcatcctatctggtaatctcagcataattattcttatcagaatttcttctcagctccatcatcctatgtatttctttctgagccacttggcttttgctgacatggcctattcatcttctgtcacacccaacatgcttgtaaacttcctggtggagagaaatacagtctcctaccttggatgtgccatccagcttggttcagcggctttctttgcaacagtcgaatgcgtccttctggctgccatggcctatgaccgctttgtggcaatttgcagtccactgctttattcaaccaaaatgtccacacaagtcagtgtccagctactcttagtagtttacatagctggttttctcattgctgtctcctatactacttccttctattttttactcttctgtggaccaaatcaagtcaatcattttttctgtgatttcgctcccttacttgaactctcctgttctgatatcagtgtctccacagttgttctctcattttcttctggatccatcattgtggtcactgtgtgtgtcatagccgtctgctacatctatatcctcatcaccatcctgaagatgcgctccactgaggggcaccacaaggccttctccacctgcacttcccacctcactgtggttaccctgttctatgggaccattaccttcatttatgtgatgcccaattttagctactcaactgaccagaacaaggtggtgtctgtgttgtacacagtggtgattcccatgttgaaccccctgatctacagcctcaggaacaaagaagttaaaaaggccataaagaggttgttcaagagaaagtgctgcaggagaaggtgagcggccgc

SEQ ID NO: 563 - DNA, 1100 bp, synthetic construct
  source 1..1100: mol_type = other DNA; note = mmLucy-FLAG-rho-OR5P2(Y145C,V212I,C213S)
ggatccgccaccatgagccaccagatcctgctgctcctggccctgctgaccctaggcctggctgattacaaggacgacgacgataagatcgaattgatgaacgggaccgagggcccaaacttctacgtgcctttctccaacaagacgggcgtggtggaattcatgaattccctgaaggacgggaatcacaccgctctgacggggttcatcctattgggcttaacagatgatccaatccttcgagtcatcctcttcatgatcatcctatctggtaatctcagcataattattcttatcagaatttcttctcagctccatcatcctatgtatttctttctgagccacttggcttttgctgacatggcctattcatcttctgtcacacccaacatgcttgtaaacttcctggtggagagaaatacagtctcctaccttggatgtgccatccagcttggttcagcggctttctttgcaacagtcgaatgcgtccttctggctgccatggcctatgaccgctttgtggcaatttgcagtccactgctttattcaaccaaaatgtccacacaagtcagtgtccagctactcttagtagtttgcatagctggttttctcattgctgtctcctatactacttccttctattttttactcttctgtggaccaaatcaagtcaatcattttttctgtgatttcgctcccttacttgaactctcctgttctgatatcagtgtctccacagttgttctctcattttcttctggatccatcattgtggtcactgtgtgtgtcatagccatctcctacatctatatcctcatcaccatcctgaagatgcgctccactgaggggcaccacaaggccttctccacctgcacttcccacctcactgtggttaccctgttctatgggaccattaccttcatttatgtgatgcccaattttagctactcaactgaccagaacaaggtggtgtctgtgttgtacacagtggtgattcccatgttgaaccccctgatctacagcctcaggaacaaagaagttaaaaaggccataaagaggttgttcaagagaaagtgctgcaggagaaggtgagcggccgc

SEQ ID NO: 564 - DNA, 1112 bp, synthetic construct
  source 1..1112: mol_type = other DNA; note = mmLucy-FLAG-rho-OR5P3
ggatccgccaccatgagccaccagatcctgctgctcctggccctgctgaccctaggcctggctgattacaaggacgacgacgataagatcgaattgatgaacgggaccgagggcccaaacttctacgtgcctttctccaacaagacgggcgtggtggaattcatggggactggaaatgacaccactgtggtagagtttactcttttggggttatctgaggatactacagtttgtgctattttatttcttgtgtttctaggaatttatgttgtcaccttaatgggtaatatcagcataattgtattgatcagaagaagtcatcatcttcatacacccatgtacattttcctctgccatttggcctttgtagacattgggtactcctcatcagtcacacctgtcatgctcatgagcttcctaaggaaagaaacctctctccctgttgctggttgtgtggcccagctctgttctgtagtgacgtttggtacggccgagtgcttcctgctggctgccatggcctatgatcgctatgtggccatctgctcacccctgctctactctacctgcatgtcccctggagtctgcatcatcttagtgggcatgtcctacctgggtggatgtgtgaatgcttggacattcattggctgcttattaagactgtccttctgtgggccaaataaagtcaatcactttttctgtgactattcaccacttttgaagcttgcttgttcccatgattttacttttgaaataattccagctatctcttctggatctatcattgtggccactgtgtgtgtcatagccatatcctacatctatatcctcatcaccatcctgaagatgcactccaccaagggccgccacaaggccttctccacctgcacctcccacctcactgcagtcactctgttctatgggaccattaccttcatttatgtgatgcccaagtccagctactcaactgaccagaacaaggtggtgtctgtgttctacaccgtggtgattcccatgttgaaccccctgatctacagcctcaggaacaaagaagttaaaaaggccataaagaggttgttcaagagaaagtgctgcaggagaaggtgagcggccgc

SEQ ID NO: 565 - DNA, 1112 bp, synthetic construct
  source 1..1112: mol_type = other DNA; note = mmLucy-FLAG-rho-OR5R1(C122R,A274V)
ggatccgccaccatgagccaccagatcctgctgctcctggccctgctgaccctaggcctggctgattacaaggacgacgacgataagatcgaattgatgaacgggaccgagggcccaaacttctacgtgcctttctccaacaagacgggcgtggtggaattcatggctgaagttaatatcatttatgtcactgtattcattctgaaaggaattaccaaccggccagagcttcaggccccgtgctttggggtgtttttagttatctatctggtcacagtgctgggcaatcttgggttgattactttaatcaagattgatactcgactccacacacctatgtactatttcctcagccacctggcctttgttgacctttgttactcctctgctattacaccgaagatgatggtgaattttgttgtggaacgcaacaccattcctttccatgcttgtgcaacccaactgggttgttttctcaccttcatgatcactgagtgtttccttctagcctccatggcctacgatcgctatgtcgccatctgtagtcccctgcattattcaacactgatgtcaagaagagtctgcattcaactggtggcagttccatatatatacagcttcctggttgccctcttccacaccgttatcactttccgtctgacttactgtggcccaaacttaattaaccatttctattgtgatgacctccccttcttagctctgtcctgctcagacacacacatgaaggaaattctgatatttgcctttgctggctttgatatgatctcttcctcttccattgtcctcacctcctacatctttattattgccgctatcctaaggatccgctctactcaggggcaacacaaagccatttccacctgtggctcccatatggtgactgtcactattttctatggcacactgatctttatgtacctacagcccaaatcaaatcactccttggacacagacaagatggtttctgtattttacacagtggtgatccccatgttaaaccccctaatctatagtctaaggaacaaagaagttaaaaaggccataaagaggttgttcaagagaaagtgctgcaggagaaggtgagcggccgc

SEQ ID NO: 566 - DNA, 1112 bp, synthetic construct
  source 1..1112: mol_type = other DNA; note = mmLucy-FLAG-rho-OR5R1(I7T,C122R,S128G)
ggatccgccaccatgagccaccagatcctgctgctcctggccctgctgaccctaggcctggctgattacaaggacgacgacgataagatcgaattgatgaacgggaccgagggcccaaacttctacgtgcctttctccaacaagacgggcgtggtggaattcatggctgaagttaatatcacttatgtcactgtattcattctgaaaggaattaccaaccggccagagcttcaggccccgtgctttggggtgtttttagttatctatctggtcacagtgctgggcaatcttgggttgattactttaatcaagattgatactcgactccacacacctatgtactatttcctcagccacctggcctttgttgacctttgttactcctctgctattacaccgaagatgatggtgaattttgttgtggaacgcaacaccattcctttccatgcttgtgcaacccaactgggttgttttctcaccttcatgatcactgagtgtttccttctagcctccatggcctacgatcgctatgtcgccatctgtggtcccctgcattattcaacactgatgtcaagaagagtctgcattcaactggtggcagttccatatatatacagcttcctggttgccctcttccacaccgttatcactttccgtctgacttactgtggcccaaacttaattaaccatttctattgtgatgacctccccttcttagctctgtcctgctcagacacacacatgaaggaaattctgatatttgcctttgctggctttgatatgatctcttcctcttccattgtcctcacctcctacatctttattattgccgctatcctaaggatccgctctactcaggggcaacacaaagccatttccacctgtggctcccatatggtgactgtcactattttctatggcacactgatctttatgtacctacagcccaaatcaaatcactccttggacacagacaagatggcttctgtattttacacagtggtgatccccatgttaaaccccctaatctatagtctaaggaacaaagaagttaaaaaggccataaagaggttgttcaagagaaagtgctgcaggagaaggtgagcggccgc

SEQ ID NO: 567 - DNA, 1127 bp, synthetic construct
  source 1..1127: mol_type = other DNA; note = mmLucy-FLAG-rho-OR5T1
ggatccgccaccatgagccaccagatcctgctgctcctggccctgctgaccctaggcctggctgattacaaggacgacgacgataagatcgaattgatgaacgggaccgagggcccaaacttctacgtgcctttctccaacaagacgggcgtggtggaattcatggatctatacaagcttcaattaaacaattttactgaagtcaccatgtttatattaataagcttcacagaagaatttgatgtgcaagtcttcctatttttattatttttagcaatctatctattcactctaataggcaatttagggctggttgtaccgatcattggggatttctggcttcacagcccaatgtactattttcttggtgttttatcattcttggatgtctgctattctacagttgtcactccaaaaatgttggtcaatttcctggcaaaaaataaatctatttcatttcttggatgtgcaacacagatgtttcttgcttgtacttttggaaccacagaatgctttctcttggctgcaatggcttatgatcgctatgtagccatctacaaccctctcctgtattcagtgagcatgtcacccagagtctatgtgccactcatcactgcttcctatgttgctagcattttacatgctactatacatacagtggctacatttagcctgtccttctgtggatccaatgaaattaggcatgtcttttgtaatatgcctcctctgcttgctatttcttgttctgacactcacgtaatccagcttctattcttctactttgtgggctctattgagatagtcactatcctgattgtcctgatctcctatggttttattctgttggccattctgaagatgcagtctgctgaagggaggagaaaagtcttctctacatgtggagctcacctaactggagtgacaatttatcatgggacaatcctcttcatgtatgtgagaccaagttccagctacacttcggacaatgacatgatagtgtcaatattttataccattgtgattcccatgctgaatcccatcatctacagtttgaggaacaaagaagttaaaaaggccataaagaggttgttcaagagaaagtgctgcaggagaaggtgagcggccgc

SEQ ID NO: 568 - DNA, 1127 bp, synthetic construct
  source 1..1127: mol_type = other DNA; note = mmLucy-FLAG-rho-OR5T1(S157G)
ggatccgccaccatgagccaccagatcctgctgctcctggccctgctgaccctaggcctggctgattacaaggacgacgacgataagatcgaattgatgaacgggaccgagggcccaaacttctacgtgcctttctccaacaagacgggcgtggtggaattcatggatctatacaagcttcaattaaacaattttactgaagtcaccatgtttatattaataagcttcacagaagaatttgatgtgcaagtcttcctatttttattatttttagcaatctatctattcactctaataggcaatttagggctggttgtaccgatcattggggatttctggcttcacagcccaatgtactattttcttggtgttttatcattcttggatgtctgctattctacagttgtcactccaaaaatgttggtcaatttcctggcaaaaaataaatctatttcatttcttggatgtgcaacacagatgtttcttgcttgtacttttggaaccacagaatgctttctcttggctgcaatggcttatgatcgctatgtagccatctacaaccctctcctgtattcagtgagcatgtcacccagagtctatgtgccactcatcactgcttcctatgttgctggcattttacatgctactatacatacagtggctacatttagcctgtccttctgtggatccaatgaaattaggcatgtcttttgtaatatgcctcctctgcttgctatttcttgttctgacactcacgtaatccagcttctattcttctactttgtgggctctattgagatagtcactatcctgattgtcctgatctcctatggttttattctgttggccattctgaagatgcagtctgctgaagggaggagaaaagtcttctctacatgtggagctcacctaactggagtgacaatttatcatgggacaatcctcttcatgtatgtgagaccaagttccagctacacttcggacaatgacatgatagtgtcaatattttataccattgtgattcccatgctgaatcccatcatctacagtttgaggaacaaagaagttaaaaaggccataaagaggttgttcaagagaaagtgctgcaggagaaggtgagcggccgc

SEQ ID NO: 569 - DNA, 1106 bp, synthetic construct
  source 1..1106: mol_type = other DNA; note = mmLucy-FLAG-rho-OR5T2(V46L)
ggatccgccaccatgagccaccagatcctgctgctcctggccctgctgaccctaggcctggctgattacaaggacgacgacgataagatcgaattgatgaacgggaccgagggcccaaacttctacgtgcctttctccaacaagacgggcgtggtggaattcatgaagaatgtcactgaagttaccttatttgtactgaagggcttcacagacaatcttgaactgcagactatcttcttcttcctgtttctagcaatctacctcttcactctcatgggaaatttaggactgattttactggtcattagggattcccagctccacaaacccatgtactattttctgagtatgttgtcttctgtggatgcctgctattcctcagttattaccccaaatatgttagtagattttacgacaaagaataaagtcatttcattccttggatgtgtagcacaggtgtttcttgcttgtagttttggaaccacagaatgctttctcttggctgcaatggcttatgatcgctatgtagccatctacaaccctctcctgtattcagtgagcatgtcacccagagtctacatgccactcatcaatgcttcctatgttgctggcattttacatgctactatacatacagtggctacatttagcctatccttctgtggagccaatgaaattaggcgtgtcttttgtgatatccctcctctccttgctatttcttattctgacactcacacaaaccagcttctactcttctactttgtgggctctatcgagctggtcactatcctgattgttctgatctcctatggtttgattctgttggccattctgaagatgtattctgctgaagggaggagaaaagtcttctccacatgtggagctcacctaactggagtgtcaatttattatgggacaatcctcttcatgtatgtgagaccaagttccagctatgcttcggaccatgacatgatagtgtcaatattttacaccattgtgattcccttgctgaatcccgtcatctacagtttgaggaacaaagaagttaaaaaggccataaagaggttgttcaagagaaagtgctgcaggagaaggtgagcggccgc

SEQ ID NO: 570 - DNA, 1148 bp, synthetic construct
  source 1..1148: mol_type = other DNA; note = mmLucy-FLAG-rho-OR5T3
ggatccgccaccatgagccaccagatcctgctgctcctggccctgctgaccctaggcctggctgattacaaggacgacgacgataagatcgaattgatgaacgggaccgagggcccaaacttctacgtgcctttctccaacaagacgggcgtggtggaattcatggacaagttgtcatcaggtttggatatatacaggaatccactgaagaacaagactgaagtcaccatgtttatattgacaggcttcacagatgattttgagctgcaagtcttcctatttttactattttttgcaatctatctctttaccttgataggcaatttagggctggttgtgttggtcattgaggattcctggctccacaaccccatgtattattttcttagtgttttatcattcttggatgcttgctattctacagttgtcactccaaaaatgttggtcaatttcctggcaaaaaataaatccatttcatttatcggatgtgcaacacagatgcttctttttgttacttttggaactacagaatgttttctcttggctgcaatggcttatgatcactatgtagccatctacaaccctctcctgtattcagtgagcatgtcacccagagtctatgtgccactcatcactgcttcctacgttgctggcattttacatgctactatacatatagtggctacatttagcctgtccttctgtggatccaatgaaattaggcatgtcttttgtgatatgcctcctctccttgctatttcttgttctgacactcacacaaaccagcttctactcttctactttgtgggttctattgagatagtcactatcctgattgtcctcatttcctgtgatttcattctgttgtccattctgaagatgcattctgctaagggaaggcaaaaggccttctctacatgtggctctcacctaactggagtgacaatttatcatggaacaattctcgtcagttatatgagaccaagttccagctatgcttcagaccatgacatcatagtgtcaatattttacacaattgtgattcccaagttgaatcccatcatctatagtttgaggaacaaagaagttaaaaaggccataaagaggttgttcaagagaaagtgctgcaggagaaggtgagcggccgc

SEQ ID NO: 571 - DNA, 1112 bp, synthetic construct
  source 1..1112: mol_type = other DNA; note = mmLucy-FLAG-rho-OR5V1
ggatccgccaccatgagccaccagatcctgctgctcctggccctgctgaccctaggcctggctgattacaaggacgacgacgataagatcgaattgatgaacgggaccgagggcccaaacttctacgtgcctttctccaacaagacgggcgtggtggaattcatggaaagaaagaatcaaacagctataactgaattcatcatcttgggattctccaacctaaatgaattgcagtttttactattcaccatcttctttctgacttatttctgtactttgggaggaaatatattaattatcttgacgactgtgactgatccacacctgcatacacctatgtattattttctagggaacttggcctttattgacatctgctacaccaccagcaatgtcccccagatgatggtgcacctcctctcaaagaaaaaaagcatttcttatgtggggtgtgtggttcaactttttgcatttgttttctttgtaggatcagagtgtctcctactggcagcaatggcatatgatcgttacattgcaatctgcaatcctttaaggtattcagttattctgagcaaggttctatgcaatcaattagcagcctcatgctgggctgctggtttccttaactcagtggtgcatacagtgttgacattctgcctgcccttctgtggcaacaatcagattaattacttcttctgtgacatcccccctttgctgatcttgtcttgtggaaacacttctgtcaatgagttggcactgctatccactggggtcttcattggttggactcctttcctttgtatcgtactttcctacatttgcataatctccaccatcttgaggatccagtcctcagagggaagacgaaaagccttttctacatgtgcctcccacctggccattgtctttctcttttatggcagcgccatctttacatatgtacggcccatctcaacttactcattaaagaaagataggttggtttcagtgttgtacagtgttgttacccccatgctaaaccctataatttacacattgaggaacaaagaagttaaaaaggccataaagaggttgttcaagagaaagtgctgcaggagaaggtgagcggccgc

SEQ ID NO: 572 - DNA, 1112 bp, synthetic construct
  source 1..1112: mol_type = other DNA; note = mmLucy-FLAG-rho-OR5W2
ggatccgccaccatgagccaccagatcctgctgctcctggccctgctgaccctaggcctggctgattacaaggacgacgacgataagatcgaattgatgaacgggaccgagggcccaaacttctacgtgcctttctccaacaagacgggcgtggtggaattcatggactgggaaaattgctcctcattaactgatttttttctcttgggaattaccaataacccagagatgaaagtgaccctatttgctgtattcttggctgtttatatcattaatttctcagcaaatcttggaatgatagttttaatcagaatggattaccaacttcacacaccaatgtatttcttcctcagtcatctgtctttctgtgatctctgctattctactgcaactgggcccaagatgctggtagatctacttgccaagaacaagtcaatacccttctatggctgtgctctgcaattcttggtcttctgtatctttgcagattctgagtgtctactgctgtcagtgatggcctttgatcggtacaaggccatcatcaaccccctgctctatacagtcaacatgtctagcagagtgtgctatctactcttgactggggtttatctggtgggaatagcagatgctttgatacatatgacactggccttccgcctatgcttctgtgggtctaatgagattaatcatttcttctgtgatatccctcctctcttattactctcttgctcagatacacaggtcaatgagttagtgttattcaccgtctttggttttattgaactgagtaccatttcaggagttttcatttcttattgttatatcatcctatcagtcttggagatacactctgctgaggggaggttcaaagctctctctacatgcacttcccacttatctgcggttgcaattttccagggaactctgctctttatgtatttccggccaagttcttcctattctctagatcaagataaaatgacctcattgttttacacccttgtggttcccatgttgaaccccctgatttatagcctgaggaacaaagaagttaaaaaggccataaagaggttgttcaagagaaagtgctgcaggagaaggtgagcggccgc

SEQ ID NO: 573 - DNA, 1127 bp, synthetic construct
  source 1..1127: mol_type = other DNA; note = mmLucy-FLAG-rho-OR6A2
ggatccgccaccatgagccaccagatcctgctgctcctggccctgctgaccctaggcctggctgattacaaggacgacgacgataagatcgaattgatgaacgggaccgagggcccaaacttctacgtgcctttctccaacaagacgggcgtggtggaattcatggagtggcggaaccatagtgggagagtgagtgagtttgtgttgctgggcttccctgctcctgcgccactacaggtactattgtttgcccttttgctgctggcctatgtgttggtgctgactgagaacacactcatcattatggcaattaggaaccattctaccctccacaaacccatgtacttttttctagctaatatgtcctttctggagatctggtatgtcactgtcactattcccaagatgcttgctggctttgttggatccaaacaggatcatggacagctaatctcctttgagggatgcatgacacagctctactttttccttggcttgggctgcactgagtgtgtccttctcgctgttatggcctatgatcgctatatggccatctgctatcctctccactacccagtcattgtcagtggccggctgtgtgtgcagatggctgctggctcttgggctggaggttttggcatctccatggtcaaagtttttcttatttctggcctctcttactgtggccccaacatcatcaaccactttttctgtgatgtctctccattgctcaacctctcatgcactgatatgtccacagcagagcttacagatttcatcctggccatttttattcttctagggccactctctgtcactggggcctcctatgtggccattactggtgctgtgatgcacattccttcggctgctggacgctataaggccttttccacctgtgcctctcatctcactgttgtgataatcttctatgcagccagtatcttcatctatgctcggccaaaggcactctcagcttttgacaccaacaagttggtctctgtactgtatgctgtcattgtaccattgctcaatcccatcatttactgcctgaggaacaaagaagttaaaaaggccataaagaggttgttcaagagaaagtgctgcaggagaaggtgagcggccgc

SEQ ID NO: 574 - DNA, 1106 bp, synthetic construct
  source 1..1106: mol_type = other DNA; note = mmLucy-FLAG-rho-OR6B1
ggatccgccaccatgagccaccagatcctgctgctcctggccctgctgaccctaggcctggctgattacaaggacgacgacgataagatcgaattgatgaacgggaccgagggcccaaacttctacgtgcctttctccaacaagacgggcgtggtggaattcatggagttggagaaccagacacgagtcaccaagttcattctggtgggattccctgggagcttgagtatgcgggcagccatgtttctgatattccttgtggcctatattctgacagtggctgaaaacgtgatcatcatcctattggtgctgcaaaatcggccactgcacaagcctatgtacttcttcctggccaacctgtccttcttggagacctggtacatctctgtgactgtgcccaagttactgtttagtttttggtctgtgaacaacagcatctctttcacactctgtatgatacaactgtacttcttcattgctctcatgtgcacagaatgtgtgcttctggccgccatggcctatgaccggtatgtggccatctgtcgcccactccactacccaaccataatgagccatgggctctgcttccgcctcgctcttggttcctgggccattggctttggcatctccctggcgaagatctacttcatctcctgcctcagcttctgtggtcccaatgtcatcaaccacttcttctgtgacatctctccagtacttaatctctcctgcacagacatgtccataactgagttggtagactttatcctggcactggtcatcttcctattcccactctttattactgtcctgtcctacggatgcattctggccaccatattatgcatgcccacaggaaagcagaaagcgttctccacttgtgcctcccatcttgtggtggtcaccattttctattcagccattattttcatgtatgctcgacctcgagttatccatgccttcaacatgaacaaaattatttccatcttctatgccattgtcactccttctctcaaccctttcatttattgcctaaggaacaaagaagttaaaaaggccataaagaggttgttcaagagaaagtgctgcaggagaaggtgagcggccgc

SEQ ID NO: 575 - DNA, 1112 bp, synthetic construct
  source 1..1112: mol_type = other DNA; note = mmLucy-FLAG-rho-OR6B2
ggatccgccaccatgagccaccagatcctgctgctcctggccctgctgaccctaggcctggctgattacaaggacgacgacgataagatcgaattgatgaacgggaccgagggcccaaacttctacgtgcctttctccaacaagacgggcgtggtggaattcatgagtggggagaatgtcaccaaggtcagcaccttcatcctggtgggcctccccacggccccagggctgcagtacctgctcttcctcctcttcctgctcacctacctctttgtcctggtggagaacctggccatcatcctcatcgtctggagcagcacctccctccacaggcccatgtactactttctgagctccatgtctttcctggagatctggtacgtgtctgacatcacccccaagatgctggagggcttcctcctccagcagaaacgcatctctttcgtcgggtgcatgacgcagctctacttcttcagctccctggtgtgcaccgagtgtgtgcttctggcctccatggcctacgaccgctacgtggccatctgccacccgctgcgctaccacgtccttgtgaccccggggctgtgcctccagctggtgggcttctcctttgtgagtggcttcaccatctccatgatcaaggtctgttttatctccagcgtcacgttctgtggctccaacgtcttgaaccacttcttctgtgacatttcccccatcctcaagctggcctgcacggacttctccactgcagagctggtggatttcatcctggccttcatcatcctggtgtttccgctcctggccaccatactgtcatattggcacatcaccctggctgtcctgcgcatcccctcggccaccggctgctggagagccttctctacctgcgcctctcacctcaccgtggtcaccgtcttctatacagccttgcttttcatgtatgtccggccccaagccattgattcccagagctccaacaagctcatctctgccgtgtacactgttgtcacgccaataattaaccctttgatttactgcctgaggaacaaagaagttaaaaaggccataaagaggttgttcaagagaaagtgctgcaggagaaggtgagcggccgc

SEQ ID NO: 576 - DNA, 1112 bp, synthetic construct
  source 1..1112: mol_type = other DNA; note = mmLucy-FLAG-rho-OR6B3
ggatccgccaccatgagccaccagatcctgctgctcctggccctgctgaccctaggcctggctgattacaaggacgacgacgataagatcgaattgatgaacgggaccgagggcccaaacttctacgtgcctttctccaacaagacgggcgtggtggaattcatgagtggggagaatgtcaccagggtcggcaccttcatcctggtgggcttccccacggccccagggctgcagtacctgctcttcctcctcttcctgctcacctacctctttgtcctggtggagaacctggccatcatcctcaccgtctggagcagcacctccctccacaggcccatgtactactttctgagctccatgtctttcctagagatctggtacgtgtctgacatcacccccaagatgctggagggcttcctcctccagcagaaacgcatctctttcgtcgggtgcatgacgcagctctacttcttcagctccctggtgtgcaccgagtgtgtgcttctggcctccatggcctacgaccgctacgtggccatctgccacccgctgcgctaccacgtccttgtgaccccggggctgtgcctccagctggtgggcttctcctttgtgagtggcttcaccatctccatgatcaaggtctgttttatctccagcgtcacgttctgtggctccaacgtcttgaaccacttcttctgtgacatttcccccatcctcaagctggcctgcacggacttctccactgcagagctggtggatttcattctggccttcatcatcctggtgtttccactcctggccaccatgctgtcatatgcgcacatcaccctggctgtcctgcgcatcccctcggccaccggctgctggagagccttcttcacctgcgcctctcacctcaccgtggtcaccgtcttctatacagccttgcttttcatgtatgtccggccccaggccattgattcccggagctccaacaagctcatctctgttttgtacacagttatcacccccatcttgaaccccttgatatactgcctgaggaacaaagaagttaaaaaggccataaagaggttgttcaagagaaagtgctgcaggagaaggtgagcggccgc

SEQ ID NO: 577 - DNA, 1112 bp, synthetic construct
  source 1..1112: mol_type = other DNA; note = mmLucy-FLAG-rho-OR6B3(C234Y)
ggatccgccaccatgagccaccagatcctgctgctcctggccctgctgaccctaggcctggctgattacaaggacgacgacgataagatcgaattgatgaacgggaccgagggcccaaacttctacgtgcctttctccaacaagacgggcgtggtggaattcatgagtggggagaatgtcaccagggtcggcaccttcatcctggtgggcttccccacggccccagggctgcagtacctgctcttcctcctcttcctgctcacctacctctttgtcctggtggagaacctggccatcatcctcaccgtctggagcagcacctccctccacaggcccatgtactactttctgagctccatgtctttcctagagatctggtacgtgtctgacatcacccccaagatgctggagggcttcctcctccagcagaaacgcatctctttcgtcgggtgcatgacgcagctctacttcttcagctccctggtgtgcaccgagtgtgtgcttctggcctccatggcctacgaccgctacgtggccatctgccacccgctgcgctaccacgtccttgtgaccccggggctgtgcctccagctggtgggcttctcctttgtgagtggcttcaccatctccatgatcaaggtctgttttatctccagcgtcacgttctgtggctccaacgtcttgaaccacttcttctgtgacatttcccccatcctcaagctggcctgcacggacttctccactgcagagctggtggatttcattctggccttcatcatcctggtgtttccactcctggccaccatgctgtcatatgcgcacatcaccctggctgtcctgcgcatcccctcggccaccggctactggagagccttcttcacctgcgcctctcacctcaccgtggtcaccgtcttctatacagccttgcttttcatgtatgtccggccccaggccattgattcccggagctccaacaagctcatctctgttttgtacacagttatcacccccatcttgaaccccttgatatactgcctgaggaacaaagaagttaaaaaggccataaagaggttgttcaagagaaagtgctgcaggagaaggtgagcggccgc

SEQ ID NO: 578 - DNA, 1106 bp, synthetic construct
  source 1..1106: mol_type = other DNA; note = mmLucy-FLAG-rho-OR6C1(C130Y,H165D,V246I)
ggatccgccaccatgagccaccagatcctgctgctcctggccctgctgaccctaggcctggctgattacaaggacgacgacgataagatcgaattgatgaacgggaccgagggcccaaacttctacgtgcctttctccaacaagacgggcgtggtggaattcatgagaaaccatacagaaataacagagtttattcttctgggattaacagatgacccaaattttcaggttgtaatctttgtcttcctgctcatcacctacatgctcagcatcactgggaacctgacccttatcacaattaccctgctggattcccacctgcagacccccatgtatttcttcctcagaaatttctccatattagaaatttcgttcacaaccgtcagtatacccaagtttctgggtaacattatttcaggagataaaaccatttcctttaataattgcatagttcagttatttttcttcattctcttgggagtcacagagttttaccttctggctgccatgtcctatgaccgctatgtggccatctgcaagcctctgcattacttgagtatcatgaatcgaagagtctgcacactgcttgtttttacttcttggctggtttcattcttaatcatattcccagcactcatgttgcttttaaagcttgattactgtaggtctaatattattgaccattttacctgtgattattttccactgctgcaacttgcttgttcagacacaaaattcttagaggtgatgggattttcttgtgctgcgtttactctaatgttcactttggcattaatatttctgtcctacatatacattatcagaacaattttgagaattccttctactagtcagaggacaaaggccttttccacatgttcttcccacatggttgttatctccatctcttatggcagctgcatttttatgtacattaaaccctcagcaaaagatagagtgtccttgagcaagggagtggcaatactaaacacctcagtagcccccatgatgaacccctttatttacagcctaaggaacaaagaagttaaaaaggccataaagaggttgttcaagagaaagtgctgcaggagaaggtgagcggccgc

SEQ ID NO: 579 - DNA, 1106 bp, synthetic construct
  source 1..1106: mol_type = other DNA; note = mmLucy-FLAG-rho-OR6C2
ggatccgccaccatgagccaccagatcctgctgctcctggccctgctgaccctaggcctggctgattacaaggacgacgacgataagatcgaattgatgaacgggaccgagggcccaaacttctacgtgcctttctccaacaagacgggcgtggtggaattcatgaaaaaccacacagtaataagaacttttatcctgctgggactgacaggtgacccacacctgcaagttctgctttttatctttctatttctcacctacatgttgagtgtaacagggaacctgactattatcaccctcacattggtggaccaccaccttaaaactcctatgtacttctttctcagaaatttttccttcttagaagtctcatttactacagtctgcattcccagattcttgtacaatatatcaatgggggacaataccattacctacaatgcttgtgccagtcaaatattctttgttattctctttggagcaacagaattttttctcttggcagccatgtcctatgaccgctatgtggccatctgtaaaccccttcattatgtggtcatcatgaacaacagggtgtgtaccttattagttctctgctgttgggtggctggcttgatgatcattgttccaccacttagcttaggcctccagctcgaattctgtgactccaatgccattgatcattttagctgtgatgcaggtcctctcctaaagatctcatgctcagatacatgggtaatagaacagatggttatacttatggctgtatttgcactcattatcaccctagtttgtgtgattctgtcctacttgtacatagtcagaacaattctgaagttcccttctgttcagcaaaggaaaaaggccttttctacctgttcatcccacatgattgtggtttccattgcctatggaagctgcatcttcatctatatcaagccctctgcaaaagatgaggtggccataaataaaggagtttcagttcttactacttctgtcgcacccttgttgaaccccttcatttacaccttgaggaacaaagaagttaaaaaggccataaagaggttgttcaagagaaagtgctgcaggagaaggtgagcggccgc

SEQ ID NO: 580 - DNA, 1103 bp, synthetic construct
  source 1..1103: mol_type = other DNA; note = mmLucy-FLAG-rho-OR6C3
ggatccgccaccatgagccaccagatcctgctgctcctggccctgctgaccctaggcctggctgattacaaggacgacgacgataagatcgaattgatgaacgggaccgagggcccaaacttctacgtgcctttctccaacaagacgggcgtggtggaattcatgaaccacacaatggtcacagagtttgtcctcctgggcctttctgatgatcctgaccttcagattgtgatttttctctttttatttatcacgtatatattaagtgttactggaaacctgactatcatcaccctaacctttgtggactcccatctgcagacacctatgtatttcttcctccggaacttctctttcttagaaatctcatttacaaccgtatgcatccccagatttctgggggcaattatcaccaggaataagactatttcctataacaactgtgcagcccaactctttttctttatcttcatgggggtgactgaattttacattttaactgccatgtcctatgaccgctatgttgccatctgcaagccccttcattacacatccatcatgaacaggaaactctgcactctacttgtgctgtgtgcctggctaagtgggtttctgaccattttcccaccccttatgcttctcctccagctggattactgtgcttccaacgtcattgatcactttgcatgtgactattttcccctcttacaactatcttgttcagatacatggctcctagaagtaattggtttttactttgctttggttactttgctgttcactttggcattagtgattttatcttacatgtacattatcaggaccattttgagaatcccgtctgccagtcaaagaaaaaaggctttctccacttgttcttctcacatgattgtcatttccatttcttatggaagctgtatattcatgtatgctaatccatctgcaaaagaaaaggcatcattgacaaaaggaatagctattctcaatacatctgttgcccccatgctgaaccccttcatttacactctgaggaacaaagaagttaaaaaggccataaagaggttgttcaagagaaagtgctgcaggagaaggtgagcggccgc

SEQ ID NO: 581 - DNA, 1106 bp, synthetic construct
  source 1..1106: mol_type = other DNA; note = mmLucy-FLAG-rho-OR6C4
ggatccgccaccatgagccaccagatcctgctgctcctggccctgctgaccctaggcctggctgattacaaggacgacgacgataagatcgaattgatgaacgggaccgagggcccaaacttctacgtgcctttctccaacaagacgggcgtggtggaattcatgaaaaacagaaccatgtttggtgagtttattctactgggccttacaaatcaacctgaactccaagtgatgatattcatctttctgttcctcacctacatgctaagtgtcctaggaaatctgactattatcaccctcaccttactagacccccacctccagacccccatgtatttcttcctccggaatttctccttcttagaaatttccttcacatccatttttattcccagatttctgaccagcatgacaacaggaaataaagttatcagctttgctggctgcttgactcagtatttttttgctatatttcttggagctaccgagttttacctcctggcctccatgtcttatgatcgttatgtggccatctgcaaacccttgcattacctgactattatgagcagcagagtctgcatacaactagtgttctgctcctggttggggggattcctagcaatcttaccaccaatcatcctgatgacccaggtagatttctgtgtctccaacattctgaatcactattactgtgactatgggcctctcgtggagcttgcctgctcagacacaagcctcttagaactgatggtcatcctcttggccgttgtgactctcatggttactctggtgctggtgacactttcttacacatacattatcaggactattctgaggatcccttctgcccagcaaaggacaaaggccttttccacttgttcctcccacatgattgtcatctccctctcttatggcagctgcatgtttatgtacattaatccttctgcaaaagaaggaggtgctttcaacaaaggaatagctgtactcattacttcggttactcccttactgaatcccttcatatatactttaaggaacaaagaagttaaaaaggccataaagaggttgttcaagagaaagtgctgcaggagaaggtgagcggccgc

SEQ ID NO: 582 - DNA, 1106 bp, synthetic construct
  source 1..1106: mol_type = other DNA; note = mmLucy-FLAG-rho-OR6C6
ggatccgccaccatgagccaccagatcctgctgctcctggccctgctgaccctaggcctggctgattacaaggacgacgacgataagatcgaattgatgaacgggaccgagggcccaaacttctacgtgcctttctccaacaagacgggcgtggtggaattcatgaagaacaaatcaatggaaatagagttcattctcctaggattgacagatgacccacagttgcaaattgtgattttcctgtttctatttctcaactacaccttgagcctgatggggaacttaatcatcatcatcctcaccctgctggatccccggctcaagacgccaatgtatttctttctccgtaatttctcctttttggaagtaatattcacaacagtgtgtattcctagattcttgataaccattgtgactagagacaaaaccatttcttataataattgtgcaactcaattattttttatccttttaccgggagttactgagttttacctcctggctgccatgtcctatgaccgctacgttgccatctgcaaaccactgcattatccaatcattatgagcagcaaagtctgctaccaacttgtacttagctcttgggtaactggattcttaatcatatttcccccattggtcatgggactcaagctggatttttgtgcttccaaaactattgaccactttatgtgtgaaacttctcctattctgcagatctcctgcacagatacccatgtcctagaattgatgtcttttaccttagctgtggtgacacttgtggtcacactggtattagtgattctctcttacacttgcattattaagaccattctgaaattctcttctgcacagcaaaggaacaaagcattttccacctgtacttcccacatgattgttgtctccatgacatacggtagctgtatctttatgtatattaaaccatctgcaaaagaaagagtgactgtatccaaaggtgtagctttgctctatacctcaattgcccctttactaaatcccttcatttatactctcaggaacaaagaagttaaaaaggccataaagaggttgttcaagagaaagtgctgcaggagaaggtgagcggccgc

SEQ ID NO: 583 - DNA, 1106 bp, synthetic construct
  source 1..1106: mol_type = other DNA; note = mmLucy-FLAG-rho-OR6C65
ggatccgccaccatgagccaccagatcctgctgctcctggccctgctgaccctaggcctggctgattacaaggacgacgacgataagatcgaattgatgaacgggaccgagggcccaaacttctacgtgcctttctccaacaagacgggcgtggtggaattcatgccaaatatgacatcaattagagaattcattcttctgggatttacagataacccagagttacaagttgtgatattcttctttatgttgatcacatacttattgagtgtaagtggaaacatgatcatcattatgttaacattgtcaaatattcatttgaaaactcctatgtatttcttcctcaggaatttctctttcttagaaatttcatttacgacagtcttcattcctagatttctgatcaacattgctacaggagacacaaccatttcctataatgcttccatggcccaagtattttttttaattcttttgggatcaacagaattttttcttctggctgtcatgtcttatgatcgctatgtggctatctgcaaacctctacattatacaaccatcatgagtaacaaagtctgtaattggcttgtaatcagctcctggctggctggttttctcattatttttccccccgtgattatgggcctccaactggatttttgtgactccagcactattgaccatttcatctgtgattcttcccctatgctgctgattgcttgcacagacacacagtttctagagcttatggcatttttgctagcagtattcacactcatggtaactttggccttggtggttctctcctacacactcatccttaaaacaattctgaagattccctctgcccagcaaaggaaaaaggctttttcaacttgttcctcccatatgattgtggtttctgtttcttatgggagttgcatttttatgtgtgtaaaaacatctgcaaaagaaggtatggctttgagcaaaggtgtagcagtgcttaatacctctgttgctcctatgttgaatccctttatttataccttaaggaacaaagaagttaaaaaggccataaagaggttgttcaagagaaagtgctgcaggagaaggtgagcggccgc

SEQ ID NO: 584 - DNA, 1106 bp, synthetic construct
  source 1..1106: mol_type = other DNA; note = mmLucy-FLAG-rho-OR6C65(T222A)
ggatccgccaccatgagccaccagatcctgctgctcctggccctgctgaccctaggcctggctgattacaaggacgacgacgataagatcgaattgatgaacgggaccgagggcccaaacttctacgtgcctttctccaacaagacgggcgtggtggaattcatgccaaatatgacatcaattagagaattcattcttctgggatttacagataacccagagttacaagttgtgatattcttctttatgttgatcacatacttattgagtgtaagtggaaacatgatcatcattatgttaacattgtcaaatattcatttgaaaactcctatgtatttcttcctcaggaatttctctttcttagaaatttcatttacgacagtcttcattcctagatttctgatcaacattgctacaggagacacaaccatttcctataatgcttccatggcccaagtattttttttaattcttttgggatcaacagaattttttcttctggctgtcatgtcttatgatcgctatgtggctatctgcaaacctctacattatacaaccatcatgagtaacaaagtctgtaattggcttgtaatcagctcctggctggctggttttctcattatttttccccccgtgattatgggcctccaactggatttttgtgactccagcactattgaccatttcatctgtgattcttcccctatgctgctgattgcttgcacagacacacagtttctagagcttatggcatttttgctagcagtattcacactcatggtaactttggccttggtggttctctcctacacactcatccttaaagcaattctgaagattccctctgcccagcaaaggaaaaaggctttttcaacttgttcctcccatatgattgtggtttctgtttcttatgggagttgcatttttatgtgtgtaaaaacatctgcaaaagaaggtatggctttgagcaaaggtgtagcagtgcttaatacctctgttgctcctatgttgaatccctttatttataccttaaggaacaaagaagttaaaaaggccataaagaggttgttcaagagaaagtgctgcaggagaaggtgagcggccgc

SEQ ID NO: 585 - DNA, 1106 bp, synthetic construct
  source 1..1106: mol_type = other DNA; note = mmLucy-FLAG-rho-OR6C68(A45T)
ggatccgccaccatgagccaccagatcctgctgctcctggccctgctgaccctaggcctggctgattacaaggacgacgacgataagatcgaattgatgaacgggaccgagggcccaaacttctacgtgcctttctccaacaagacgggcgtggtggaattcatgagaaaacacacagcaataacaacattcatccttctgggactgacagaagatcctcagctgcaggttctgcttttcatgtttctatttatcacctacatgttgagtgtaacagggaaactgaccattatcaccctcaccatgttggatccccacctgaaaacacccatgtatttttttctccaaaatttatctttcttagaaatctcatttacagctacctgtgttccaagattcttatacagtatctcaactgggaacaaaataataacgtataatgcatgtgtcattcagctattttttgcagacctctttggggtaactgaattttttcttttggctaccatgtcatatgatcgctatgtggccatctgcaaacccttgcattatatggcaatcatgagcaacaaagtgtgcaaaacaatggttatttgttgttggatggcagcacttatgattatcctcccaccacttagcttaggttttcatctagaattctgtgactctaatgtcatcaatcattttggctgtgatgcattgcctattctgaaaataccatgctcagacacatcattaattgagcagatggttgtagcctctgctgtattaacctttattatcactcttgtatgtgtagttctgtcctacacatatatcataagaacaattctaaaattcccttctgttcaacaaaagaaaaaagccttttctacctgttcttcacatattactgtggtttccatcacttatggcagctgcatcttcatctatatcaagccatctgcaaaagaagaggtaaacattaataaaggtgtgtcagtgcttatttcatccatatcacctatgttgaattctttcatatatactcttaggaacaaagaagttaaaaaggccataaagaggttgttcaagagaaagtgctgcaggagaaggtgagcggccgc

SEQ ID NO: 586 - DNA, 1106 bp, synthetic construct
  source 1..1106: mol_type = other DNA; note = mmLucy-FLAG-rho-OR6C70(L181P)
ggatccgccaccatgagccaccagatcctgctgctcctggccctgctgaccctaggcctggctgattacaaggacgacgacgataagatcgaattgatgaacgggaccgagggcccaaacttctacgtgcctttctccaacaagacgggcgtggtggaattcatgaagaatcatacaaggcagatagaatttattcttctgggactgacggataattctcagttacagattgtaattttcttatttctacttctaaattgtgtgttgagcatgatagggaacttcactatcattgccctcattctgctggattcccagctcaagactccaatgtatttcttcctccgtaatttctcttttctggaaatttcattcacaactgcttgcattcccagattcctaatcaccattgttaccagggaaaagaccatttcctgtaatggttgcatatctcagttgtttttttacatattcttgggggttacagaatttttccttctagctgctctgtcctatgatcgctatgttgccatctgcaaacctttgcgttatatgtccatcatgagtaacaaagtttgctaccagcttgtattcagttcttgggtaactggattcctgatcattttcactccactgattttaggtcttaacttggatttctgtgcttcaaatatcattgatcatttcatttgtgacatttctcctatcctacaactttcttgctcagacacacatttactggaactgattgcctttttattagctgtgatgacacttattgtcacattgtttttagtaatcctttcttactcttacatcatcaagacaattctgaaattcccttcagctcagcaaaagaagaaagccttttccacctgctcttctcacatgattgttgtctccatcacttatggtagttgtatgtttatctacataaagccatcagcgaatgaaagagttgctttaagcaaaggagtaactgtgctcaatacttcagttgccccgttgttaaacccatttatttatactctgaggaacaaagaagttaaaaaggccataaagaggttgttcaagagaaagtgctgcaggagaaggtgagcggccgc

SEQ ID NO: 587 - DNA, 1106 bp, synthetic construct
  source 1..1106: mol_type = other DNA; note = mmLucy-FLAG-rho-OR6C74
ggatccgccaccatgagccaccagatcctgctgctcctggccctgctgaccctaggcctggctgattacaaggacgacgacgataagatcgaattgatgaacgggaccgagggcccaaacttctacgtgcctttctccaacaagacgggcgtggtggaattcatgagaaaccatacaacagtagcaaactttattcttcttggactgacagatgatccacaattacaggtgattatttttcttctcctttttttcacctacatgttgagcatcactgggaatctaaccatcatcactctcaccctactggatttgcatctcaagacacccatgtatttcttcctccgaaatttctcatttttagaagtctcattcacaactgtctacattcccaaatttcttgttagtatggcaacaggtgataagaccatttcttacaacgattgtgcagcacagctgtttttcactattctcttgggggcaactgaattttttcttctggctgccatgtcctatgagcgctatgtggccatctgcaaacccctgcattacaccaccatcatgagcagcagagtttgcagcttgctggtctttgcttcatggatggctggcttcctaataatttttccgccactcctgatgggtctccagcttgatttctgtgcagccaacactgtagatcatttcttctgtgatgtttctcctatactgcagctctcttgcacagacactgacataatagaattaatgatgcttctctcagccattttgacgctcctggttacactggtattagtgattctctcctacacaaatattatcaggactattctgaaaataccttcttctcaacagagaaaaaaagcattttctacatgttcttcccacatggtggtcgtgtccatttcttatggcagctgcatcttcatgtatgtgaaaccctcagcaaaagaaagagtgtcattaaataaagggatagctctgctcagcacttctgttgcccccatgttgaatccctttatttatacactgaggaacaaagaagttaaaaaggccataaagaggttgttcaagagaaagtgctgcaggagaaggtgagcggccgc

SEQ ID NO: 588 - DNA, 1106 bp, synthetic construct
  source 1..1106: mol_type = other DNA; note = mmLucy-FLAG-rho-OR6C75
ggatccgccaccatgagccaccagatcctgctgctcctggccctgctgaccctaggcctggctgattacaaggacgacgacgataagatcgaattgatgaacgggaccgagggcccaaacttctacgtgcctttctccaacaagacgggcgtggtggaattcatgagaaattccacagcagtaacagactttattcttcttggattgacaagtgacccacagtggcaggttgtacttttcatatttcttcttgttacctacatgttaagtgtgactgggaacctgatcattatcaccctcaccctttcagatccccatctgcagactcccatgtatttcttccttcggaacttctcattcctggaaatttcattcacgtctgtctgcattcccagattccttgtcactgttgtgacaggaaacagaaccatttcttataatgggtgtgtggctcagctattttttttcatcttcttgggggtgacagaattttaccttctggctgccatgtcctatgaccgctgcatggccatctgcaaacctcttcattacacaatcatcatgagcaccagagtgtgtacccttcttgtctttagctcctggcttgcagggtttctgatcatctttccaccagtaatgcttctgctgcagttggatttctgtgcctccaatgtaattgatcattttatctgtgactcttctccaatgctgcagctctcttgcacaaacactcactttctagaactcatggcattttttttagctgtggtaacactgatggtcaccttgacattagttattctctcctacacaaacatcatccggacaattctgaaaattccttctatgagtcaaaggaaaaaagccttttccacttgctcctcccatatgatagttgtctccatctcttacagtagctgtatcttcatgtacattaagacttctgccagagaaagggtgactttaagcaaaggagtagctgtgctcaatacctcagtggctcctctcttgaatcccttcatatacacactgaggaacaaagaagttaaaaaggccataaagaggttgttcaagagaaagtgctgcaggagaaggtgagcggccgc

SEQ ID NO: 589 - DNA, 1103 bp, synthetic construct
  source 1..1103: mol_type = other DNA; note = mmLucy-FLAG-rho-OR6C76
ggatccgccaccatgagccaccagatcctgctgctcctggccctgctgaccctaggcctggctgattacaaggacgacgacgataagatcgaattgatgaacgggaccgagggcccaaacttctacgtgcctttctccaacaagacgggcgtggtggaattcatgaaaaatagaacatcagtgacagatttcatccttctgggtctgacggataatccgcaactgcaggttgtgattttctcgttcctatttcttacgtatgtactgagtgttactggaaatctaactatcatctcccttaccctgctggattcccacctgaagacccccatgtatttcttcctcaggaatttctccttggaaatttcatttacttctgtctgtaatcctagatttctgatcagcattctaacaggggacaaatccatatcttataatgcttgtgcagctcagctatttttctttatcttccttggctcaacggagtttttcctcctggcctctatgtcctatgattgctatgtggctatatgtaagcctctgcattatacaaccatcatgagtgacaggatctgttatcagcttataatcagctcttggctggctggtttcttggtaatttttccaccactggccatgggcttacagctggatttctgtgactccaatgtcattgaccactttacctgtgactctgctcctttgctgcaaatctcttgcacagacacaagtactctagagctcatgagctttattttagctctgtttactcttatatccactttgatattagtaattctctcctatacttacatcatcagaactattctgagaatcccctcagcacagcaaagaaaaaaagccttttcaacctgctcctcacatgtgattgttgtctctatctcttatggaagctgcatcttcatgtatgtgaaaacatcagcaaaggaaggagttgctttgacaaaaggagtagctatactcaatacctctgtcgctcctatgctgaatccatttatttacactctaaggaacaaagaagttaaaaaggccataaagaggttgttcaagagaaagtgctgcaggagaaggtgagcggccgc

SEQ ID NO: 590 - DNA, 1112 bp, synthetic construct
  source 1..1112: mol_type = other DNA; note = mmLucy-FLAG-rho-OR6F1
ggatccgccaccatgagccaccagatcctgctgctcctggccctgctgaccctaggcctggctgattacaaggacgacgacgataagatcgaattgatgaacgggaccgagggcccaaacttctacgtgcctttctccaacaagacgggcgtggtggaattcatggacacaggcaacaaaactctgccccaggactttctcttactgggctttcctggttctcaaactcttcagctctctctctttatgctttttctggtgatgtacatcctcacagttagtggtaatgtggctatcttgatgttggtgagcacctcccatcagttgcatacccccatgtacttctttctgagcaacctctccttcctggagatttggtataccacagcagcagtgcccaaagcactggccatcctactggggagaagtcagaccatatcatttacaagctgtcttttgcagatgtactttgttttctcattaggctgcacagagtacttcctcctggcagccatggcttatgaccgctgtcttgccatctgctatcctttacactacggagccatcatgagtagcctgctctcagcgcagctggccctgggctcctgggtgtgtggtttcgtggccattgcagtgcccacagccctcatcagtggcctgtccttctgtggcccccgtgccatcaaccacttcttctgtgacattgcaccctggattgccctggcctgcaccaacacacaggcagtagagcttgtggcctttgtgattgctgttgtggttatcctgagttcatgcctcatcacctttgtctcctatgtgtacatcatcagcaccatcctcaggatcccctctgccagtggccggagcaaagccttctccacgtgctcctcgcatctcaccgtggtgctcatttggtatgggtccacagttttccttcacgtccgcacctctatcaaagatgccttggatctgatcaaagctgtccacgtcctgaacactgtggtgactccagttttaaaccccttcatctatacgcttaggaacaaagaagttaaaaaggccataaagaggttgttcaagagaaagtgctgcaggagaaggtgagcggccgc

SEQ ID NO: 591 - DNA, 1109 bp, synthetic construct
  source 1..1109: mol_type = other DNA; note = mmLucy-FLAG-rho-OR6J1
ggatccgccaccatgagccaccagatcctgctgctcctggccctgctgaccctaggcctggctgattacaaggacgacgacgataagatcgaattgatgaacgggaccgagggcccaaacttctacgtgcctttctccaacaagacgggcgtggtggaattcatgggtaactggactgcagcggtgactgagtttgttctgctggggttttccctgagcagggaggtggagctgctgctcctggtgctcctgctgcccacgttcctgctgactcttctggggaacctgctcatcatctccactgtgctgtcctgctcccgcctccacacccccatgtacttcttcttgtgcaacctctctatcctggacatcctcttcacctcagtcatctctccaaaagtgttggccaacttaggatctagggataaaaccatctcctttgccggatgtatcacccagtgctatttctactttttcttgggcacagttgagttcctcctgctgacggtcatgtcctatgaccgttatgccaccatctgctgccccctgcggtacaccaccatcatgagaccttctgtctgcattgggaccgttgtattctcttgggtgggaggcttcctgtctgtgctctttccaaccatcctcatctcccagctgcccttctgtggctccaatatcattaaccacttcttctgtgacagtggacccttgctggccctggcctgtgcagacaccactgccatcgagctgatggattttatgctttcttccatggtcatcctctgctgcatagtcctcgtggcctattcctatacgtacatcatcttgaccatagtgcgcattccttctgcaagtggaaggaagaaggcctttaatacctgtgcttcccacctgaccatagtcatcattcctagtggcatcactgtgtttatctatgtgactccctcccagaaagaatatctggagatcaacaagatccctttggttctgagcagtgtggtgactccattcctcaacccctttatatatactctgaggaacaaagaagttaaaaaggccataaagaggttgttcaagagaaagtgctgcaggagaaggtgagcggccgc

SEQ ID NO: 592 - DNA, 1109 bp, synthetic construct
  source 1..1109: mol_type = other DNA; note = mmLucy-FLAG-rho-OR6J1(P250S)
ggatccgccaccatgagccaccagatcctgctgctcctggccctgctgaccctaggcctggctgattacaaggacgacgacgataagatcgaattgatgaacgggaccgagggcccaaacttctacgtgcctttctccaacaagacgggcgtggtggaattcatgggtaactggactgcagcggtgactgagtttgttctgctggggttttccctgagcagggaggtggagctgctgctcctggtgctcctgctgcccacgttcctgctgactcttctggggaacctgctcatcatctccactgtgctgtcctgctcccgcctccacacccccatgtacttcttcttgtgcaacctctctatcctggacatcctcttcacctcagtcatctctccaaaagtgttggccaacttaggatctagggataaaaccatctcctttgccggatgtatcacccagtgctatttctactttttcttgggcacagttgagttcctcctgctgacggtcatgtcctatgaccgttatgccaccatctgctgccccctgcggtacaccaccatcatgagaccttctgtctgcattgggaccgttgtattctcttgggtgggaggcttcctgtctgtgctctttccaaccatcctcatctcccagctgcccttctgtggctccaatatcattaaccacttcttctgtgacagtggacccttgctggccctggcctgtgcagacaccactgccatcgagctgatggattttatgctttcttccatggtcatcctctgctgcatagtcctcgtggcctattcctatacgtacatcatcttgaccatagtgcgcattccttctgcaagtggaaggaagaaggcctttaatacctgtgcttcccacctgaccatagtcatcatttctagtggcatcactgtgtttatctatgtgactccctcccagaaagaatatctggagatcaacaagatccctttggttctgagcagtgtggtgactccattcctcaacccctttatatatactctgaggaacaaagaagttaaaaaggccataaagaggttgttcaagagaaagtgctgcaggagaaggtgagcggccgc

SEQ ID NO: 593 - DNA, 1115 bp, synthetic construct
  source 1..1115: mol_type = other DNA; note = mmLucy-FLAG-rho-OR6K2
ggatccgccaccatgagccaccagatcctgctgctcctggccctgctgaccctaggcctggctgattacaaggacgacgacgataagatcgaattgatgaacgggaccgagggcccaaacttctacgtgcctttctccaacaagacgggcgtggtggaattcatggagagccccaatcgaaccaccattcaggagtttatcttctccgctttcccttattcctgggttaagtctgttgtctgctttgttccactgctcttcatctatgctttcattgttgttggaaacctggtcatcatcacagtggtccagttgaatactcacctccacactcccatgtatacttttatcagtgctctttctttcctggagatttggtataccacagccacaatcccaaagatgctgtctagcctgcttagtgagaggagcatttccttcaatggttgtctcctgcagatgtatttcttccattccaccggcatctgtgaggtgtgtctcttgacagttatggcctttgaccactacctggccatatgcagccctcttcattatccctctatcatgacccccaagctatgtacccaactgactttaagttgctgtgtttgtggctttatcacaccccttcctgagattgcctggatctctacactgccattttgtggttcgaatcaccttgaacatatcttctgtgacttcctcccagtgctgcgtctggcctgcacagacacacgagccatcgtcatgattcaggtagtggatgtcattcatgcagtggagattattacagctgtgatgctcatcttcatgtcctacgatggtattgtggctgtaattctacgtattcattcagctggaggccgccgcacagcattttccacgtgtgtctctcacttcattgtcttttcgctcttctttggcagtgtgactctcatgtacctacgcttctctgccacctactctttgttctgggatatagccattgctctggcctttgcagttttgtctcccttcttcaaccccattatctatagcctgaggaacaaagaagttaaaaaggccataaagaggttgttcaagagaaagtgctgcaggagaaggtgagcggccgc

SEQ ID NO: 594 - DNA, 1109 bp, synthetic construct
  source 1..1109: mol_type = other DNA; note = mmLucy-FLAG-rho-OR6K3
ggatccgccaccatgagccaccagatcctgctgctcctggccctgctgaccctaggcctggctgattacaaggacgacgacgataagatcgaattgatgaacgggaccgagggcccaaacttctacgtgcctttctccaacaagacgggcgtggtggaattcatggagagcggaaaccaatcaacagtgactgaatttatcttcactggattccctcagcttcaggatggtagtctcctgtacttctttcctttacttttcatctatacttttattatcattgataacttattaatcttctctgctgtaaggctggacacccatctccacaaccccatgtataattttatcagtatattttcctttctggagatctggtacaccacagccaccattcccaagatgctctccaacctcatcagtgaaaagaaggccatctcaatgactggctgcatcttgcagatgtatttcttccactcacttgaaaactcagaggggatcttgctgaccaccatggccattgacagatacgttgccatctgcaaccctcttcgctatcaaatgatcatgaccccccggctctgtgctcaactctctgcaggttcctgcctcttcggtttccttatcctgcttcccgagattgtgatgatttccacactgcctttctgtgggcccaaccaaatccatcagatcttctgtgacttggtccctgtgctaagcctggcctgtacagacacgtccatgattctgattgaggatgtgattcatgctgtgaccatcatcattaccttcctaatcattgccctgtcctatgtaagaattgtcactgtgatattgaggattccctcttctgaagggaggcaaaaggctttttctacctgtgcaggccacctcatggtcttcccgatattctttggcagtgtatcactcatgtacttgcgtttcagcgacacttatccaccagttttggacacagccattgcactgatgtttactgtacttgctccattcttcaatcccatcatttatagcctgaggaacaaagaagttaaaaaggccataaagaggttgttcaagagaaagtgctgcaggagaaggtgagcggccgc

SEQ ID NO: 595 - DNA, 1109 bp, synthetic construct
  source 1..1109: mol_type = other DNA; note = mmLucy-FLAG-rho-OR6K3(P228S,P248L)
ggatccgccaccatgagccaccagatcctgctgctcctggccctgctgaccctaggcctggctgattacaaggacgacgacgataagatcgaattgatgaacgggaccgagggcccaaacttctacgtgcctttctccaacaagacgggcgtggtggaattcatggagagcggaaaccaatcaacagtgactgaatttatcttcactggattccctcagcttcaggatggtagtctcctgtacttctttcctttacttttcatctatacttttattatcattgataacttattaatcttctctgctgtaaggctggacacccatctccacaaccccatgtataattttatcagtatattttcctttctggagatctggtacaccacagccaccattcccaagatgctctccaacctcatcagtgaaaagaaggccatctcaatgactggctgcatcttgcagatgtatttcttccactcacttgaaaactcagaggggatcttgctgaccaccatggccattgacagatacgttgccatctgcaaccctcttcgctatcaaatgatcatgaccccccggctctgtgctcaactctctgcaggttcctgcctcttcggtttccttatcctgcttcccgagattgtgatgatttccacactgcctttctgtgggcccaaccaaatccatcagatcttctgtgacttggtccctgtgctaagcctggcctgtacagacacgtccatgattctgattgaggatgtgattcatgctgtgaccatcatcattaccttcctaatcattgccctgtcctatgtaagaattgtcactgtgatattgaggatttcctcttctgaagggaggcaaaaggctttttctacctgtgcaggccacctcatggtcttcctgatattctttggcagtgtatcactcatgtacttgcgtttcagcgacacttatccaccagttttggacacagccattgcactgatgtttactgtacttgctccattcttcaatcccatcatttatagcctgaggaacaaagaagttaaaaaggccataaagaggttgttcaagagaaagtgctgcaggagaaggtgagcggccgc

SEQ ID NO: 596 - DNA, 1121 bp, synthetic construct
  source 1..1121: mol_type = other DNA; note = mmLucy-FLAG-rho-OR6K6
ggatccgccaccatgagccaccagatcctgctgctcctggccctgctgaccctaggcctggctgattacaaggacgacgacgataagatcgaattgatgaacgggaccgagggcccaaacttctacgtgcctttctccaacaagacgggcgtggtggaattcatgacacagttgacggccagtgggaatcagacaatggtgactgagttcctcttctctatgttcccgcatgcgcacagaggtggcctcttattctttattcccttgcttctcatctacggatttatcctaactggaaacctaataatgttcattgtcatccaggtgggcatggccctgcacacccctttgtatttctttatcagtgtcctctccttcctggagatctgctataccacaaccaccatccccaagatgctgtcctgcctaatcagtgagcagaagagcatttccgtggctggctgcctcctgcagatgtactttttccactcacttggtatcacagaaagctgtgtcctgacagcaatggccattgacaggtacatagctatctgcaatccactccgttacccaaccatcatgattcccaaactttgtatccagctgacagttggatcctgcttttgtggcttcctccttgtgcttcctgagattgcatggatttccaccttgcctttctgtggctccaaccagatccaccagatattctgtgatttcacacctgtgctgagcttggcctgcacagatacattcctagtggtcattgtggatgccatccatgcagcggaaattgtagcctccttcctggtcattgctctatcctacatccggattattatagtgattctgggaatgcactcagctgaaggtcatcacaaggccttttccacctgtgctgctcaccttgctgtgttcttgctattttttggcagtgtggctgtcatgtatttgagattctcagccacctactcagtgttttgggacacagcaattgctgtcacttttgttatccttgctccctttttcaaccccatcatctatagcctgaggaacaaagaagttaaaaaggccataaagaggttgttcaagagaaagtgctgcaggagaaggtgagcggccgc

SEQ ID NO: 597 - DNA, 1103 bp, synthetic construct
  source 1..1103: mol_type = other DNA; note = mmLucy-FLAG-rho-OR6M1
ggatccgccaccatgagccaccagatcctgctgctcctggccctgctgaccctaggcctggctgattacaaggacgacgacgataagatcgaattgatgaacgggaccgagggcccaaacttctacgtgcctttctccaacaagacgggcgtggtggaattcatgggaaactggagcactgtgactgaaatcaccctaattgccttcccagctctcctggagattcgaatatctctcttcgtggttcttgtggtaacttacacattaacagcaacaggaaacatcaccatcatctccctgatatggattgatcatcgcctgcaaactccaatgtacttcttcctcagtaatttgtcctttctggatatcttatacaccactgtcattaccccaaagttgttggcctgcctcctaggagaagagaaaaccatatcttttgctggttgcatgatccaaacatatttctacttctttctggggacggtggagtttatcctcttggcggtgatgtcctttgaccgctacatggctatctgcgacccactgcactacacggtcatcatgaacagcagggcctgccttctgctggttctgggatgctgggtgggagccttcctgtctgtgttgtttccaaccattgtagtgacaaggctaccttactgtaggaaagaaattaatcatttcttctgtgacattgcccctcttcttcaggtggcctgtataaatactcacctcattgagaagataaactttctcctctctgcccttgtcatcctgagctccctggcattcactactgggtcctacgtgtacataatttctaccatcctgcgtatcccctccacccagggccgtcagaaagctttttctacctgtgcttctcacatcactgttgtctccattgcccacgggagcaacatctttgtgtatgtgagacccaatcagaactcctcactggattatgacaaggtggccgctgtcctcatcacagtggtgacccctctcctgaacccttttatctacagcttgaggaacaaagaagttaaaaaggccataaagaggttgttcaagagaaagtgctgcaggagaaggtgagcggccgc

SEQ ID NO: 598 - DNA, 1112 bp, synthetic construct
  source 1..1112: mol_type = other DNA; note = mmLucy-FLAG-rho-OR6N1
ggatccgccaccatgagccaccagatcctgctgctcctggccctgctgaccctaggcctggctgattacaaggacgacgacgataagatcgaattgatgaacgggaccgagggcccaaacttctacgtgcctttctccaacaagacgggcgtggtggaattcatggacacagggaactggagccaggtagcagaattcatcatcttgggcttcccccatctccagggtgtccagatttatctcttcctcttgttgcttctcatttacctcatgactgtgttgggaaacctgctgatattcctggtggtctgcctggactcccggcttcacacacccatgtaccactttgtcagcattctctccttctcagagcttggctatacagctgccaccatccctaagatgctggcaaacttgctcagtgagaaaaagaccatttcattctctgggtgtctcctgcagatctatttctttcactcccttggagcgactgagtgctatctcctgacagctatggcctacgataggtatttagccatctgccggcccctccactacccaaccctcatgaccccaacactttgtgcagagattgccattggctgttggttgggaggcttggctgggccagtagttgaaatttccttgatttcacgcctcccattctgtggccccaatcgcattcagcacgtcttttgtgacttccctcctgtgctgagtttggcttgcactgatacgtctataaatgtcctagtagattttgttataaattcctgcaagatcctagccaccttcctgctgatcctctgctcctatgtgcagatcatctgcacagtgctcagaattccctcagctgccggcaagaggaaggccatctccacgtgtgcctcccacttcactgtggttctcatcttctatgggagcatcctttccatgtatgtgcagctgaagaagagctactcactggactatgaccaggccctggcagtggtctactcagtgctcacacccttcctcaaccccttcatctacagcttgaggaacaaagaagttaaaaaggccataaagaggttgttcaagagaaagtgctgcaggagaaggtgagcggccgc

SEQ ID NO: 599 - DNA, 1112 bp, synthetic construct
  source 1..1112: mol_type = other DNA; note = mmLucy-FLAG-rho-OR6N1(I194T,F245L,Q261R)
ggatccgccaccatgagccaccagatcctgctgctcctggccctgctgaccctaggcctggctgattacaaggacgacgacgataagatcgaattgatgaacgggaccgagggcccaaacttctacgtgcctttctccaacaagacgggcgtggtggaattcatggacacagggaactggagccaggtagcagaattcatcatcttgggcttcccccatctccagggtgtccagatttatctcttcctcttgttgcttctcatttacctcatgactgtgttgggaaacctgctgatattcctggtggtctgcctggactcccggcttcacacacccatgtaccactttgtcagcattctctccttctcagagcttggctatacagctgccaccatccctaagatgctggcaaacttgctcagtgagaaaaagaccatttcattctctgggtgtctcctgcagatctatttctttcactcccttggagcgactgagtgctatctcctgacagctatggcctacgataggtatttagccatctgccggcccctccactacccaaccctcatgaccccaacactttgtgcagagattgccattggctgttggttgggaggcttggctgggccagtagttgaaatttccttgatttcacgcctcccattctgtggccccaatcgcattcagcacgtcttttgtgacttccctcctgtgctgagtttggcttgcactgatacgtctacaaatgtcctagtagattttgttataaattcctgcaagatcctagccaccttcctgctgatcctctgctcctatgtgcagatcatctgcacagtgctcagaattccctcagctgccggcaagaggaaggccatctccacgtgtgcctcccacctcactgtggttctcatcttctatgggagcatcctttccatgtatgtgcggctgaagaagagctactcactggactatgaccaggccctggcagtggtctactcagtgctcacacccttcctcaaccccttcatctacagcttgaggaacaaagaagttaaaaaggccataaagaggttgttcaagagaaagtgctgcaggagaaggtgagcggccgc

SEQ ID NO: 600 - DNA, 1112 bp, synthetic construct
  source 1..1112: mol_type = other DNA; note = mmLucy-FLAG-rho-OR6N2
ggatccgccaccatgagccaccagatcctgctgctcctggccctgctgaccctaggcctggctgattacaaggacgacgacgataagatcgaattgatgaacgggaccgagggcccaaacttctacgtgcctttctccaacaagacgggcgtggtggaattcatggatcaatacaaccattcaagcctggctgaatttgtgttccttggctttgccagtgtgggctatgtcaggggctggctttttgtcctgctgctattggcatacctgttcaccatctgtggtaacatgctcatcttctcagtcatccgactggatgcagctctgcacacacctatgtaccactttgtcagtgttctttccttcttggagttgtggtatacagctaccactatccctaagatgttgtctaatattctcagtgagaagaaaaccatttcttttgcaggatgcctccttcagacctacttcttccactccttgggagcgtctgaatgctaccttcttacagccatggcctatgatagatacctggccatttgtcggcccctccactaccctataattatgaccaccacactctgtgccaagatggctgctgcttgttggacttgtggcttcctgtgtcccatttctgaggtcatccttgcctcccagctcccattttgtgcttacaatgaaatccaacacattttctgtgactttccacctttgctgagcttggcctgcaaggacacatctgctaacattctggtggactttgccattaatgctttcataattcttatcactttcttctttatcatgatttcttatgcaaggatcattggggctgtgctgaagataaaaacagcatcaggaagaaagaaggccttttctacctgtgcctcacatcttgctgtggtcctcatcttctttgggagcatcatcttcatgtatgtgcggctaaagaagagctattccctgacccttgaccgaacacttgctatagtttactccgtactaacaccaatggtcaatccaattatctacagtcttaggaacaaagaagttaaaaaggccataaagaggttgttcaagagaaagtgctgcaggagaaggtgagcggccgc

SEQ ID NO: 601 - DNA, 1112 bp, synthetic construct
  source 1..1112: mol_type = other DNA; note = mmLucy-FLAG-rho-OR6P1
ggatccgccaccatgagccaccagatcctgctgctcctggccctgctgaccctaggcctggctgattacaaggacgacgacgataagatcgaattgatgaacgggaccgagggcccaaacttctacgtgcctttctccaacaagacgggcgtggtggaattcatgagaaatttgagtggaggccatgtcgaggagtttgtcttggtgggtttccctaccacgcctcccctccagctgctcctctttgtccttttttttgcaatttaccttctgacattgttggagaatgcacttattgtcttcacaatatggcttgctccaagccttcatcgtcccatgtactttttccttggccatctctctttcctggagctatggtacatcaatgtcaccattcctcggctcttggcagcctttcttacccaggatggtagagtctcctacgtaggttgcatgacccaactgtacttctttattgccttagcctgtactgaatgtgtgctgttggcagttatggcctatgatcgctacctggccatctgtggacccctcctttaccctagtctcatgccttccagtctggccactcgccttgctgctgcctcttggggcagtggcttcttcagctccatgatgaagcttctttttatttcccaattgtcctactgtggacccaacattatcaaccactttttctgtgatatttccccactactcaacctcacctgctctgacaaggagcaagcagagctagtagacttccttctggccctggtgatgattctactccctctattggctgtggtttcatcatacactgccatcattgcagccatcctgaggatccctacgtccaggggacgccacaaagccttttccacttgtgccgctcatctggcagtggttgttatctactactcctccactctcttcacctatgcacggccccgggccatgtacaccttcaaccacaacaagattatctctgtgctctacactatcattgtaccattcttcaacccagccatctactgcctgaggaacaaagaagttaaaaaggccataaagaggttgttcaagagaaagtgctgcaggagaaggtgagcggccgc

SEQ ID NO: 602 - DNA, 1124 bp, synthetic construct
  source 1..1124: mol_type = other DNA; note = mmLucy-FLAG-rho-OR6Q1
ggatccgccaccatgagccaccagatcctgctgctcctggccctgctgaccctaggcctggctgattacaaggacgacgacgataagatcgaattgatgaacgggaccgagggcccaaacttctacgtgcctttctccaacaagacgggcgtggtggaattcatgcaaccatataccaaaaactggacccaggtaactgaatttgtcatgatgggctttgctggcatccatgaagcacacctcctcttcttcatactcttcctcaccatgtacctgttcaccttggtggagaatttggccatcattttagtggtgggtttggaccaccgactacggagacccatgtatttcttcctgacacacttgtcctgccttgaaatctggtacacttctgttacagtgcccaagatgctggctggttttattggggtggatggtggcaagaatatctcttatgctgattgcctatcccagctcttcatcttcacctttcttggggcaactgagtgtttcctactggctgccatggcctatgatcgttatgtggccatttgtatgcctctccactatggggcttttgtgtcctggggcacctgcatccgtctggcagctgcctgttggctggtaggtttcctcacacccatcttgccaatctacctcttgtctcagctaacattttatggcccaaatgtcattgaccatttctcctgtgatgcctcacccttgctagccttgtcgtgctcagatgtcacttggaaggagactgtggatttcctggtgtctctggctgtgctactggcctcctctatggtcattgctgtgtcctatggcaacatcgtctggacactgctgcacatccgctcagctgctgagcgctggaaggccttctctacctgtgcagctcacctgactgtggtgagcctcttctatggcactcttttctttatgtatgtccagaccaaggtgacctcctccatcaacttcaacaaggtggtatctgtcttctactctgttgtcacgcccatgctcaatcctctcatctacagtcttaggaacaaagaagttaaaaaggccataaagaggttgttcaagagaaagtgctgcaggagaaggtgagcggccgc

SEQ ID NO: 603 - DNA, 1124 bp, synthetic construct
  source 1..1124: mol_type = other DNA; note = mmLucy-FLAG-rho-OR6Q1((D100G,Y173C)
ggatccgccaccatgagccaccagatcctgctgctcctggccctgctgaccctaggcctggctgattacaaggacgacgacgataagatcgaattgatgaacgggaccgagggcccaaacttctacgtgcctttctccaacaagacgggcgtggtggaattcatgcaaccatataccaaaaactggacccaggtaactgaatttgtcatgatgggctttgctggcatccatgaagcacacctcctcttcttcatactcttcctcaccatgtacctgttcaccttggtggagaatttggccatcattttagtggtgggtttggaccaccgactacggagacccatgtatttcttcctgacacacttgtcctgccttgaaatctggtacacttctgttacagtgcccaagatgctggctggttttattggggtggatggtggcaagaatatctcttatgctggttgcctatcccagctcttcatcttcacctttcttggggcaactgagtgtttcctactggctgccatggcctatgatcgttatgtggccatttgtatgcctctccactatggggcttttgtgtcctggggcacctgcatccgtctggcagctgcctgttggctggtaggtttcctcacacccatcttgccaatctacctcttgtctcagctaacattttgtggcccaaatgtcattgaccatttctcctgtgatgcctcacccttgctagccttgtcgtgctcagatgtcacttggaaggagactgtggatttcctggtgtctctggctgtgctactggcctcctctatggtcattgctgtgtcctatggcaacatcgtctggacactgctgcacatccgctcagctgctgagcgctggaaggccttctctacctgtgcagctcacctgactgtggtgagcctcttctatggcactcttttctttatgtatgtccagaccaaggtgacctcctccatcaacttcaacaaggtggtatctgtcttctactctgttgtcacgcccatgctcaatcctctcatctacagtcttaggaacaaagaagttaaaaaggccataaagaggttgttcaagagaaagtgctgcaggagaaggtgagcggccgc

SEQ ID NO: 604 - DNA, 1121 bp, synthetic construct
  source 1..1121: mol_type = other DNA; note = mmLucy-FLAG-rho-OR6S1(T42I,V156I)
ggatccgccaccatgagccaccagatcctgctgctcctggccctgctgaccctaggcctggctgattacaaggacgacgacgataagatcgaattgatgaacgggaccgagggcccaaacttctacgtgcctttctccaacaagacgggcgtggtggaattcatgagtcctgatgggaaccacagtagtgatccaacagagttcgtcctggcagggctcccaaatctcaacagcgcaagagtggaattattttctgtgtttcttcttgtctatctcctgaatctgataggcaatgtgttgattgtgggggtggtaagggctgatactcgactacagacccctatgtacttctttctgggtaacctgtcctgcctagagatactgctcacttctgtcatcattccaaagatgctgagcaatttcctctcaaggcaacacactatttcctttgctgcatgtatcacccaattctatttctacttctttctcggggcctccgagttcttactgttggctgtcatgtctgcggatcgctacctggccatctgtcatcctctgcgctaccccttgctcatgagtggggctgtgtgctttcgtgtggccttggcctgctgggtggggggactcatccctgtgcttggtcccacagtggctgtggccttgcttcctttctgtaagcagggtgctgtggtacagcacttcttctgcgacagtggcccactgctccgcctggcttgcaccaacaccaagaagctggaggagactgactttgtcctggcctccctcgtcattgtatcttccttgctgatcactgctgtgtcctacggcctcattgtgctggcagtcctgagcatcccctctgcttcaggccgtcagaaggccttctctacctgtacctcccacttgatagtggtgaccctcttctatggaagtgccatttttctctatgtgcggccatcgcagagtggttctgtggacactaactgggcagtgacagtaataacgacatttgtgacaccactgttgaatccattcatctatgccttaaggaacaaagaagttaaaaaggccataaagaggttgttcaagagaaagtgctgcaggagaaggtgagcggccgc

SEQ ID NO: 605 - DNA, 1121 bp, synthetic construct
  source 1..1121: mol_type = other DNA; note = mmLucy-FLAG-rho-OR6S1(R237H)
ggatccgccaccatgagccaccagatcctgctgctcctggccctgctgaccctaggcctggctgattacaaggacgacgacgataagatcgaattgatgaacgggaccgagggcccaaacttctacgtgcctttctccaacaagacgggcgtggtggaattcatgagtcctgatgggaaccacagtagtgatccaacagagttcgtcctggcagggctcccaaatctcaacagcgcaagagtggaattattttctgtgtttcttcttgtctatctcctgaatctgacaggcaatgtgttgattgtgggggtggtaagggctgatactcgactacagacccctatgtacttctttctgggtaacctgtcctgcctagagatactgctcacttctgtcatcattccaaagatgctgagcaatttcctctcaaggcaacacactatttcctttgctgcatgtatcacccaattctatttctacttctttctcggggcctccgagttcttactgttggctgtcatgtctgcggatcgctacctggccatctgtcatcctctgcgctaccccttgctcatgagtggggctgtgtgctttcgtgtggccttggcctgctgggtggggggactcgtccctgtgcttggtcccacagtggctgtggccttgcttcctttctgtaagcagggtgctgtggtacagcacttcttctgcgacagtggcccactgctccgcctggcttgcaccaacaccaagaagctggaggagactgactttgtcctggcctccctcgtcattgtatcttccttgctgatcactgctgtgtcctacggcctcattgtgctggcagtcctgagcatcccctctgcttcaggccatcagaaggccttctctacctgtacctcccacttgatagtggtgaccctcttctatggaagtgccatttttctctatgtgcggccatcgcagagtggttctgtggacactaactgggcagtgacagtaataacgacatttgtgacaccactgttgaatccattcatctatgccttaaggaacaaagaagttaaaaaggccataaagaggttgttcaagagaaagtgctgcaggagaaggtgagcggccgc

SEQ ID NO: 606 - DNA, 1112 bp, synthetic construct
  source 1..1112: mol_type = other DNA; note = mmLucy-FLAG-rho-OR6T1
ggatccgccaccatgagccaccagatcctgctgctcctggccctgctgaccctaggcctggctgattacaaggacgacgacgataagatcgaattgatgaacgggaccgagggcccaaacttctacgtgcctttctccaacaagacgggcgtggtggaattcatgaaccctgaaaactggactcaggtaacaagctttgtccttctgggtttccccagtagccacctcatacagttcctggtgttcctggggttaatggtgacctacattgtaacagccacaggcaagctgctaattattgtgctcagctggatagaccaacgcctgcacatacagatgtacttcttcctgcggaatttctccttcctggagctgttgctggtaactgttgtggttcccaagatgcttgtcgtcatcctcacgggggatcacaccatctcatttgtcagctgcatcatccagtcctacctctacttctttctaggcaccactgacttcttcctcttggccgtcatgtctctggatcgttacctggcaatctgccgaccactccgctatgagaccctgatgaatggccatgtctgttcccaactagtgctggcctcctggctagctggattcctctgggtcctttgccccactgtcctcatggccagcctgcctttctgtggccccaatggtattgaccacttctttcgtgacagttggcccttgctcaggctttcttgtggggacacccacctgctgaaactggtggctttcatgctctctacgttggtgttactgggctcactggctctgacctcagtttcctatgcctgcattcttgccactgttctcagggcccctacagctgctgagcgaaggaaagcgttttccacttgcgcctcgcatcttacagtggtggtcatcatctatggcagttccatctttctctacattcgtatgtcagaggctcagtccaaactgctcaacaaaggtgcctccgtcctgagctgcatcatcacacccctcttgaacccattcatcttcactctcaggaacaaagaagttaaaaaggccataaagaggttgttcaagagaaagtgctgcaggagaaggtgagcggccgc

SEQ ID NO: 607 - DNA, 1106 bp, synthetic construct
  source 1..1106: mol_type = other DNA; note = mmLucy-FLAG-rho-OR6V1
ggatccgccaccatgagccaccagatcctgctgctcctggccctgctgaccctaggcctggctgattacaaggacgacgacgataagatcgaattgatgaacgggaccgagggcccaaacttctacgtgcctttctccaacaagacgggcgtggtggaattcatggcaaatctgagccagccctccgaatttgtcctcttgggcttctcctcctttggtgagctgcaggcccttctgtatggccccttcctcatgctttatcttctcgccttcatgggaaacaccatcatcatagttatggtcatagctgacacccacctacatacacccatgtacttcttcctgggcaatttttccctgctggagatcttggtaaccatgactgcagtgcccaggatgctctcagacctgttggtcccccacaaagtcattaccttcactggctgcatggtccagttctacttccacttttccctggggtccacctccttcctcatcctgacagacatggcccttgatcgctttgtggccatctgccacccactgcgctatggcactctgatgagccgggctatgtgtgtccagctggctggggctgcctgggcagctcctttcctagccatggtacccactgtcctctcccgagctcatcttgattactgccatggcgacgtcatcaaccacttcttctgtgacaatgaacctctcctgcagttgtcatgctctgacactcgcctgttggaattctgggactttctgatggccttgacctttgtcctcagctccttcctggtgaccctcatctcctatggctacatagtgaccactgtgctgcggatcccctctgccagcagctgccagaaggctttctccacttgcgggtctcacctcacactggtcttcatcggctacagtagtaccatctttctgtatgtcaggcctggcaaagctcactctgtgcaagtcaggaaggtcgtggccttggtgacttcagttctcaccccctttctcaatccctttatccttaccttcaggaacaaagaagttaaaaaggccataaagaggttgttcaagagaaagtgctgcaggagaaggtgagcggccgc

SEQ ID NO: 608 - DNA, 1106 bp, synthetic construct
  source 1..1106: mol_type = other DNA; note = mmLucy-FLAG-rho-OR6X1
ggatccgccaccatgagccaccagatcctgctgctcctggccctgctgaccctaggcctggctgattacaaggacgacgacgataagatcgaattgatgaacgggaccgagggcccaaacttctacgtgcctttctccaacaagacgggcgtggtggaattcatgagaaatggcacagtaatcacagaattcatcctgctaggctttcctgttatccaaggcctacaaacacctctctttattgcaatctttctcacctacatattaacccttgcaggcaatgggcttattattgccactgtgtgggctgagcccaggctacaaattccaatgtacttcttcctttgtaacttgtctttcttagaaatctggtacaccaccacagtcatccccaaactgctaggaacctttgtagtggcaagaacagtaatctgcatgtcctgctgcctgctgcaggccttcttccacttcttcgtgggcaccaccgagttcttgatcctcactatcatgtcttttgaccgctacctcaccatctgcaatccccttcaccaccccaccatcatgaccagcaaactctgcctgcagctggccctgagctcctgggtggtgggcttcaccattgtcttttgtcagacgatgctgctcatccagttgccattctgtggcaataatgttatcagtcatttctactgtgatgttgggcccagtttgaaagccgcctgcatagacaccagcattttggaactcctgggcgtcatagcaaccatccttgtgatcccagggtcacttctctttaatatgatttcttatatctacattctgtccgcaatcctacgaattccttcagccactggccaccaaaagactttctctacctgtgcctcgcacctgacagttgtctccctgctctacggggctgttctgttcatgtacctaagacccacagcacactcctcctttaagattaataaggtggtgtctgtgctaaatactatcctcaccccccttctgaatccctttatttatactattaggaacaaagaagttaaaaaggccataaagaggttgttcaagagaaagtgctgcaggagaaggtgagcggccgc

SEQ ID NO: 609 - DNA, 1127 bp, synthetic construct
  source 1..1127: mol_type = other DNA; note = mmLucy-FLAG-rho-OR6Y1
ggatccgccaccatgagccaccagatcctgctgctcctggccctgctgaccctaggcctggctgattacaaggacgacgacgataagatcgaattgatgaacgggaccgagggcccaaacttctacgtgcctttctccaacaagacgggcgtggtggaattcatgaccaccataattctggaagtagataatcatacagtgacaacacgtttcattcttctggggtttccaacacgaccagccttccagcttctctttttctccattttcctggcaacctatctgctgacactgctggagaatcttcttatcatcttagctatccacagtgatgggcagctgcataagcccatgtacttcttcttgagccacctctccttcctggagatgtggtatgtcacagtcatcagccccaagatgcttgttgacttcctcagtcatgacaagagtatttccttcaatggctgcatgactcaactttacttttttgtgacctttgtctgcactgagtacatccttcttgctatcatggcctttgaccgctatgtagccatttgtaatccactacgctacccagtcatcatgaccaaccagctctgtggcacactggctggaggatgctggttctgtggactcatgactgccatgattaagatggtttttatagcacaacttcactactgtggcatgcctcagatcaatcactacttttgtgatatctctccactccttaacgtctcctgtgaggatgcctcacaggctgagatggtggacttcttcttggccctcatggtcattgctattcctctttgtgttgtggtggcatcctacgctgctatccttgccaccatcctcaggatcccttctgctcagggccgccaaaaggcattctccacctgtgcctcccacctgaccgtcgtaattctcttctattccatgacacttttcacctatgcccgtcccaaactcatgtatgcctacaattccaacaaagtggtatctgttctctacactgtcattgttccactcctcaaccccatcatttactgtctgaggaacaaagaagttaaaaaggccataaagaggttgttcaagagaaagtgctgcaggagaaggtgagcggccgc

SEQ ID NO: 610 - DNA, 1112 bp, synthetic construct
  source 1..1112: mol_type = other DNA; note = mmLucy-FLAG-rho-OR7A10
ggatccgccaccatgagccaccagatcctgctgctcctggccctgctgaccctaggcctggctgattacaaggacgacgacgataagatcgaattgatgaacgggaccgagggcccaaacttctacgtgcctttctccaacaagacgggcgtggtggaattcatgaaatcatggaacaatacaataattttagaatttcttctcctgggaatttcagaggaaccagaattgcaggccttcctctttgggctgttcctgtccatgtacctggtcactgtgctcgggaacctgctcatcatcctggccacaatctcagactcccacctccacacccccatgtacttcttcctctccaacctgtccttcgtagacatctgttttgtctctaccactgtcccgaagatgctggtgaacatccagacacacaacaaagtcatcacctatgcaggctgcatcacccagatgtgctttttcttactctttgtaggattggataacttccttctgaccgtgatggcctatgaccggtttgtggccatctgtcaccctctgcactacatggtcattatgaaccctcaactctgtggactgctggttctggcatcctggatcatgagtgttctgaattccatgttacaaagcttaatggtgttgccactgcccttttgtacacacatggaaatccctcattttttctgtgaaattaatcaggtggtccaccttgcctgttctgacacctttcttaatgacatagtgatgtattttgcagtagcgctgctgggcggtggtcccctcactgggatcctgtactcttactctaagatagtttcctccatacgtgcaatctcatcagctcaggggaagtataaggcattttccacctgtgcatctcacctctcagttgtctccttattttatggtacatgcttaggggtgtaccttagttctgctgccacccacaattcacacacaggtgctgcagcctcagtgatgtacactgtggtcacccccatgctgaaccccttcatctacagtctgaggaacaaagaagttaaaaaggccataaagaggttgttcaagagaaagtgctgcaggagaaggtgagcggccgc

SEQ ID NO: 611 - DNA, 1112 bp, synthetic construct
  source 1..1112: mol_type = other DNA; note = mmLucy-FLAG-rho-OR7A17
ggatccgccaccatgagccaccagatcctgctgctcctggccctgctgaccctaggcctggctgattacaaggacgacgacgataagatcgaattgatgaacgggaccgagggcccaaacttctacgtgcctttctccaacaagacgggcgtggtggaattcatggaaccagagaatgacacagggatttcagaatttgttcttctgggactttctgaggaaccagaattgcagcccttcctctttgggctgtttctgtccatgtacctggtcactgtgctcgggaatctgctcatcatcctggccacaatctcagactcccacctccacacccccatgtacttcttcctctccaacctgtcctttgcagacatctgtttcatctccactacaatcccaaagatgctcattaacatccagacacagagcagagtcatcacctatgcaggctgcatcacccagatgtgcttttttgtactttttggagggttagacagcttactcctggctgtgatggcctatgatcggtttgtggccatctgtcatcctctgcactacacagtcatcatgaaccctcggctctgtggactcctggttctggcatcctggatgattgctgccctgaattccttgtcacaaagcttaatggtattgtggctgtccttctgcacagacttggaaatcccccactttttctgtgaacttaatcaggtcatccaccttgcctgttctgacacctttcttaatgacatggggatgtattttgcagcagggctgctggctggtggtccccttgtggggatcctttgctcttactctaagatagtttcctccatacgtgcaatctcatcagctcaggggaagtacaaggcattttccacctgtgcatcacacctctcagttgtctctttattttgttgtacgggcctaggtgtgtaccttacttctgctgcaacccacaactcacacacaagtgcaacagcctcagtgatgtacactgtggccacccccatgctgaacccctttatctacagtctgaggaacaaagaagttaaaaaggccataaagaggttgttcaagagaaagtgctgcaggagaaggtgagcggccgc

SEQ ID NO: 612 - DNA, 1112 bp, synthetic construct
  source 1..1112: mol_type = other DNA; note = mmLucy-FLAG-rho-OR7A5
ggatccgccaccatgagccaccagatcctgctgctcctggccctgctgaccctaggcctggctgattacaaggacgacgacgataagatcgaattgatgaacgggaccgagggcccaaacttctacgtgcctttctccaacaagacgggcgtggtggaattcatggaaccaggaaatgatacacaaatttcagaatttcttcttctgggattttcacaagaacctggactgcaacccttcctctttgggctgttcctgtccatgtacctggtcactgtgctcgggaacctgctcatcatcctggccacaatctcagactcccacctccacacccccatgtacttcttcctctccaacctgtcctttgctgacatttgtgttacttccaccaccattccaaaaatgctgatgaacatccagacacagaacaaagtcatcacctacatagcctgcctcatgcagatgtattttttcatactctttgctggatttgaaaacttcctcctgtccgtgatggcctatgaccggtttgtggccatctgtcaccccctgcactacatggtcattatgaaccctcacctctgtggactgctggttctagcatcctggaccatgagtgctctgtattccttgctacaaatcttaatggtagtacggctgtccttctgcacagccttagaaatcccccactttttctgtgaacttaatcaggtcatccaacttgcttgttctgatagctttcttaatcacatggtgatatattttacagttgcgctgctgggtggaggtcccctgactgggatcctttactcttactctaagataatttcttccatacatgcaatctcatcagctcaggggaagtacaaggcattttccacctgtgcatctcacctctcagttgtctccttattttatggtgcaatcctaggggtgtaccttagttctgctgccacccgcaactcacactcaagtgcaacagcctcagtgatgtacactgtggtcacccccatgctgaacccctttatctatagtctgaggaacaaagaagttaaaaaggccataaagaggttgttcaagagaaagtgctgcaggagaaggtgagcggccgc

SEQ ID NO: 613 - DNA, 1112 bp, synthetic construct
  source 1..1112: mol_type = other DNA; note = mmLucy-FLAG-rho-OR7C1(V126I)
ggatccgccaccatgagccaccagatcctgctgctcctggccctgctgaccctaggcctggctgattacaaggacgacgacgataagatcgaattgatgaacgggaccgagggcccaaacttctacgtgcctttctccaacaagacgggcgtggtggaattcatggaaacaggaaatcaaacacatgcccaagaatttctcctcctgggattttcagcaacgtcagagattcagttcattctctttgggctgttcctctccatgtacctagtcactttcaccgggaacctgctcatcatcctggccatatgctcagactcccacctccacacccccatgtacttcttcctctccaacctgtcttttgctgacctctgttttacctccacgactgtcccaaagatgttactgaatatactgacacagaacaaattcataacatatgcaggctgtctcagtcagattttttttttcacttcatttggatgcctggacaatttactcttgaccgtgatggcctatgaccgcttcgtggccatctgtcaccccctgcactatacggtcatcatgaacccccagctctgtggactgctggttctggggtcctggtgcatcagtgtcatgggttccctgctcgagaccttgactgttttgaggctgtccttctgcaccgaaatggaaattccacactttttttgtgatctacttgaagtcctgaagctcgcctgttctgacaccttcattaataacgtggtgatatactttgcaactggcgtcctgggtgtgatttccttcactggaatatttttctcttactataaaattgttttctctatactgaggatttcctcagctgggagaaagcacaaagcgttttccacctgtggttcccacctctcagtggtcaccttgttctatggcacgggctttggggtctatctcagttctgcagccacaccatcttctaggacaagtctggtggcctcagtgatgtacaccatggtcacccccatgctgaaccccttcatctacagcctgaggaacaaagaagttaaaaaggccataaagaggttgttcaagagaaagtgctgcaggagaaggtgagcggccgc

SEQ ID NO: 614 - DNA, 1109 bp, synthetic construct
  source 1..1109: mol_type = other DNA; note = mmLucy-FLAG-rho-OR7C2
ggatccgccaccatgagccaccagatcctgctgctcctggccctgctgaccctaggcctggctgattacaaggacgacgacgataagatcgaattgatgaacgggaccgagggcccaaacttctacgtgcctttctccaacaagacgggcgtggtggaattcatggaaagaggaaaccaaacagaagttggaaactttctcctcctgggattcgcagaggactctgacatgcagcttctcctccatgggctgttcctctccatgtacctggttaccatcatcggaaacctgctcatcatcctgaccatcagttcagactcccacctccacacccccatgtacttcttcctctccaacctgtcctttgctgacatctgtttcacatccacgactgtcccaaagatgctggtgaatatccaaacacaaagcaaaatgatcacttttgcaggctgcctcactcagatattttttttcattgcatttggatgcctggacaatttgctcctgaccatgacggcctatgaccgcttcgtggccatctgttaccccctgcactacacggtcatcatgaacccccggctctgtggactgctggttctggggtcctggtgcatcagtgtcatgggttccttgcttgagaccttgaccattttgaggctgtccttctgcacaaatatggaaattccgcactttttttgtgatccttccgaagtcctgaagctggcctgttctgacaccttcatcaataacatcgtgatgtattttgtgaccattgtcctgggtgtttttcctctctgtggaatcctattctcttattctcagattttctcctccgtcctaagagtatctgccagaggccagcacaaagccttttccacctgtggttcccacctctcagtggtcagcttgttctatggcactggccttggggtctatctcagttctgcagttacaccaccttctaggacaagtctggcagcctcggtgatgtacaccatggtcacccccatgctgaaccccttcatctacagcctgaggaacaaagaagttaaaaaggccataaagaggttgttcaagagaaagtgctgcaggagaaggtgagcggccgc

SEQ ID NO: 615 - DNA, 1112 bp, synthetic construct
  source 1..1112: mol_type = other DNA; note = mmLucy-FLAG-rho-OR7D2
ggatccgccaccatgagccaccagatcctgctgctcctggccctgctgaccctaggcctggctgattacaaggacgacgacgataagatcgaattgatgaacgggaccgagggcccaaacttctacgtgcctttctccaacaagacgggcgtggtggaattcatggaagcaggaaaccaaacaggatttttagagtttatccttctcggactctctgaggatccagaactacagccgttcatatttgggctgttcctgtccatgtacctggtgacggtgctgggaaacctgctcatcatcctggccatcagctctgactcccacctccacacccccatgtacttcttcctctccaacctgtcctgggttgacatctgtttcagcacttgcatcgtccccaagatgctggtgaacatccagaccgagaacaaagccatctcctacatggactgcctcacacaggtctatttctccatgttttttcctattctggacacgctactcctgaccgtgatggcctatgaccggtttgtggctgtctgccaccctctgcactatatgatcatcatgaacccccacctctgtggcctcctggtttttgtcacctggctcattggtgtcatgacatccctcctccatatttctctgatgatgcatctaatcttctgtaaagattttgaaattccacattttttctgcgaactgacgtacatcctccagctggcctgctctgataccttcctgaacagcacgttgatatactttatgacgggtgtgctgggcgtttttcccctccttgggatcattttctcttattcacgaattgcttcatccataaggaagatgtcctcatctgggggaaaacaaaaagcactttccacctgtgggtctcacctctccgtcgtttctttattttatgggacaggcattggggtccacttcacttctgcggtgactcactcttcccagaaaatctccgtggcctcggtgatgtacactgtggtcacccccatgttgaaccccttcatctacagcctgaggaacaaagaagttaaaaaggccataaagaggttgttcaagagaaagtgctgcaggagaaggtgagcggccgc

SEQ ID NO: 616 - DNA, 1112 bp, synthetic construct
  source 1..1112: mol_type = other DNA; note = mmLucy-FLAG-rho-OR7D4
ggatccgccaccatgagccaccagatcctgctgctcctggccctgctgaccctaggcctggctgattacaaggacgacgacgataagatcgaattgatgaacgggaccgagggcccaaacttctacgtgcctttctccaacaagacgggcgtggtggaattcatggaagcagaaaaccttacagaattatcaaaatttctcctcctgggactctcagatgatcctgaactgcagcccgtcctctttgggctgttcctgtccatgtacctggtcacggtgctggggaacctgctcatcattctggccgtcagctctgactcccacctccacacccccatgtacttcttcctctccaacctgtcctttgttgacatctgtttcatctccaccacagtccccaagatgctagtgagcatccaggcacggagcaaagacatctcctacatggggtgcctcactcaggtgtattttttaatgatgtttgctggaatggatactttcctactggccgtgatggcctatgaccggtttgtggccatctgccacccactgcactacacggtcatcatgaacccctgcctctgtggcctcctggttctggcatcttggttcatcattttctggttctccctggttcatattctactgatgaagaggttgaccttctccacaggcactgagattccgcatttcttctgtgaaccggctcaggtcctcaaggtggcctgctctaacaccctcctcaataacattgtcttgtatgtggccacggcactgctgggtgtgtttcctgtagctgggatcctcttctcctactctcagattgtctcctccttaatgggaatgtcctccaccaagggcaagtacaaagccttttccacctgtggatctcacctctgtgtggtctccttgttctatggaacaggacttggggtctatctgagttctgctgtgacccattcttcccagagcagctccaccgcctcagtgatgtacgccatggtcacccccatgctgaaccccttcatctacagcctgaggaacaaagaagttaaaaaggccataaagaggttgttcaagagaaagtgctgcaggagaaggtgagcggccgc

SEQ ID NO: 617 - DNA, 1112 bp, synthetic construct
  source 1..1112: mol_type = other DNA; note = mmLucy-FLAG-rho-OR7E24
ggatccgccaccatgagccaccagatcctgctgctcctggccctgctgaccctaggcctggctgattacaaggacgacgacgataagatcgaattgatgaacgggaccgagggcccaaacttctacgtgcctttctccaacaagacgggcgtggtggaattcatggagccacagaatctcacaggtgtctcagaattcctcctcctgggactctcagaggatccagaactgcagccggtcctcgctgggctgttcctgtccatgtacctggtcacggtgctggggaacctgctcatcatcctggctgtcagctctgactcccacctccacacccccatgtacttcttcctctccaacctgtccttggctgacatcggtttcacctccaccacggtccccaagatgattgtggacatgcaaactcacagcagagtcatctcctatgaaggctgcctgactcagatgtctttttttgtcctttttgcatgtatggatgacatgctcctgagtgtgatggcctatgaccggtttgtggccatctgtcaccccctgcactaccgaatcatcatgaacccacgcctctgtggcttcttaatcttgttgtctttttttattagtcttttggactcccagttgcacaatttgattatgttacagctcacctgcttcaaggatgtggacatttctaatttcttctgtgacccttctcaactcctccaccttaggtgttccgacaccttcatcaatgaaatggtcatatatttcatgggtgccatatttggctgtctccctatctcagggatccttttctcttactataaaattgtttcccccattctgagagttccaacatcagatgggaagtataaagccttctccacctgtggctctcacctggcagttgtttgcttattttatggaacagggcttgtagggtacctcagttcagctgtgttaccatcccccaggaagagtatggtggcttcagtgatgtacactgtggtcacccccatgctgaaccccttcatctacagcctgaggaacaaagaagttaaaaaggccataaagaggttgttcaagagaaagtgctgcaggagaaggtgagcggccgc

SEQ ID NO: 618 - DNA, 1112 bp, synthetic construct
  source 1..1112: mol_type = other DNA; note = mmLucy-FLAG-rho-OR7E24(P242S)
ggatccgccaccatgagccaccagatcctgctgctcctggccctgctgaccctaggcctggctgattacaaggacgacgacgataagatcgaattgatgaacgggaccgagggcccaaacttctacgtgcctttctccaacaagacgggcgtggtggaattcatggagccacagaatctcacaggtgtctcagaattcctcctcctgggactctcagaggatccagaactgcagccggtcctcgctgggctgttcctgtccatgtacctggtcacggtgctggggaacctgctcatcatcctggctgtcagctctgactcccacctccacacccccatgtacttcttcctctccaacctgtccttggctgacatcggtttcacctccaccacggtccccaagatgattgtggacatgcaaactcacagcagagtcatctcctatgaaggctgcctgactcagatgtctttttttgtcctttttgcatgtatggatgacatgctcctgagtgtgatggcctatgaccggtttgtggccatctgtcaccccctgcactaccgaatcatcatgaacccacgcctctgtggcttcttaatcttgttgtctttttttattagtcttttggactcccagttgcacaatttgattatgttacagctcacctgcttcaaggatgtggacatttctaatttcttctgtgacccttctcaactcctccaccttaggtgttccgacaccttcatcaatgaaatggtcatatatttcatgggtgccatatttggctgtctccctatctcagggatccttttctcttactataaaattgtttcctccattctgagagttccaacatcagatgggaagtataaagccttctccacctgtggctctcacctggcagttgtttgcttattttatggaacagggcttgtagggtacctcagttcagctgtgttaccatcccccaggaagagtatggtggcttcagtgatgtacactgtggtcacccccatgctgaaccccttcatctacagcctgaggaacaaagaagttaaaaaggccataaagaggttgttcaagagaaagtgctgcaggagaaggtgagcggccgc

SEQ ID NO: 619 - DNA, 1112 bp, synthetic construct
  source 1..1112: mol_type = other DNA; note = mmLucy-FLAG-rho-OR7G1
ggatccgccaccatgagccaccagatcctgctgctcctggccctgctgaccctaggcctggctgattacaaggacgacgacgataagatcgaattgatgaacgggaccgagggcccaaacttctacgtgcctttctccaacaagacgggcgtggtggaattcatgggacccagaaaccaaacagctgtttcagaatttcttctcatgaaagtgacagaggacccagaactgaagttaatccctttcagcctgttcctgtccatgtacctggtcaccatcctggggaacctgctcattctcctggctgtcatctctgactcccacctccacacccccatgtacttccttctctttaatctctcctttactgacatctgtttaaccacaaccacagtcccaaagatcctagtgaacatccaagctcagaatcagagtatcacttacacaggctgcctcacccagatctgtcttgtcttggtttttgctggcttggaaagttgctttcttgcagtcatggcctacgaccgctatgtggccatttgccacccactgaggtacacagtcctcatgaatgtccatttctggggcttgctgattcttctctccatgttcatgagcactatggatgccctggttcagagtctgatggtattgcagctgtccttctgcaaaaacgttgaaatccctttgttcttctgtgaagtcgttcaggtcatcaagctcgcctgttctgacaccctcatcaacaacatcctcatatattttgcaagtagtgtatttggtgcaattcctctctctggaataattttctcttattctcaaatagtcacctctgttctgagaatgccatcagcaagaggaaagtataaagcgttttccacctgtggctgtcacctctctgttttttccttgttctatgggacagcttttggggtgtacattagttctgctgttgctgagtcttcccgaattactgctgtggcttcagtgatgtacactgtggtccctcaaatgatgaaccccttcatctacagcctgaggaacaaagaagttaaaaaggccataaagaggttgttcaagagaaagtgctgcaggagaaggtgagcggccgc

SEQ ID NO: 620 - DNA, 1112 bp, synthetic construct
  source 1..1112: mol_type = other DNA; note = mmLucy-FLAG-rho-OR7G1(V83A,W141C,Y252C)
ggatccgccaccatgagccaccagatcctgctgctcctggccctgctgaccctaggcctggctgattacaaggacgacgacgataagatcgaattgatgaacgggaccgagggcccaaacttctacgtgcctttctccaacaagacgggcgtggtggaattcatgggacccagaaaccaaacagctgtttcagaatttcttctcatgaaagtgacagaggacccagaactgaagttaatccctttcagcctgttcctgtccatgtacctggtcaccatcctggggaacctgctcattctcctggctgtcatctctgactcccacctccacacccccatgtacttccttctctttaatctctcctttactgacatctgtttaaccacaaccacagtcccaaagatcctagcgaacatccaagctcagaatcagagtatcacttacacaggctgcctcacccagatctgtcttgtcttggtttttgctggcttggaaagttgctttcttgcagtcatggcctacgaccgctatgtggccatttgccacccactgaggtacacagtcctcatgaatgtccatttctgtggcttgctgattcttctctccatgttcatgagcactatggatgccctggttcagagtctgatggtattgcagctgtccttctgcaaaaacgttgaaatccctttgttcttctgtgaagtcgttcaggtcatcaagctcgcctgttctgacaccctcatcaacaacatcctcatatattttgcaagtagtgtatttggtgcaattcctctctctggaataattttctcttattctcaaatagtcacctctgttctgagaatgccatcagcaagaggaaagtataaagcgttttccacctgtggctgtcacctctctgttttttccttgttctgtgggacagcttttggggtgtacattagttctgctgttgctgagtcttcccgaattactgctgtggcttcagtgatgtacactgtggtccctcaaatgatgaaccccttcatctacagcctgaggaacaaagaagttaaaaaggccataaagaggttgttcaagagaaagtgctgcaggagaaggtgagcggccgc

SEQ ID NO: 621 - DNA, 1112 bp, synthetic construct
  source 1..1112: mol_type = other DNA; note = mmLucy-FLAG-rho-OR7G2
ggatccgccaccatgagccaccagatcctgctgctcctggccctgctgaccctaggcctggctgattacaaggacgacgacgataagatcgaattgatgaacgggaccgagggcccaaacttctacgtgcctttctccaacaagacgggcgtggtggaattcatggaagcgagaaaccaaacagctatttcaaaattccttctcctgggactgatagaggatccggaactgcagcccgtccttttcagcctgttcctgtccatgtacttggtcaccatcctggggaacctgctcatcctcttggctgtcatctctgactctcacctccacacccccatgtacttcttcctctccaatctctcctttttggacatttgtttaagcacaaccacgatcccaaagatgctggtgaacatccaagctcagaatcggagcatcacgtactcaggctgcctcacccagatctgctttgtcttgttttttgctggcttggaaaattgtctccttgcagcaatggcctatgaccgctatgtggccatttgtcacccccttagatacacagtcatcatgaacccccgcctctgtggcctgctgattcttctctctctgttgactagtgttgtgaatgcccttcttctcagcctgatggtgttgaggctgtccttctgcacagacctggaaatcccgctcttcttctgtgaactggctcaggtcatccaactcacctgttcagacaccctcatcaataacatcctgatatattttgcagcttgcatatttggtggtgttcctctgtctggaatcattttgtcttacactcagatcacctcctgtgttttgagaatgccatcagcaagtggaaagcacaaagcagtttccacctgtgggtctcacctctccattgttctcttgttctatggggcaggtttgggggtgtacattagttctgtggttactgactcacctaggaagactgcagtggcttcagtgatgtattctgtgttccctcaaatggtgaacccctttatctatagtctgaggaacaaagaagttaaaaaggccataaagaggttgttcaagagaaagtgctgcaggagaaggtgagcggccgc

SEQ ID NO: 622 - DNA, 1112 bp, synthetic construct
  source 1..1112: mol_type = other DNA; note = mmLucy-FLAG-rho-OR7G3
ggatccgccaccatgagccaccagatcctgctgctcctggccctgctgaccctaggcctggctgattacaaggacgacgacgataagatcgaattgatgaacgggaccgagggcccaaacttctacgtgcctttctccaacaagacgggcgtggtggaattcatgaaagcaggaaacttctcagacactccagaattctttctcttgggattgtcaggggatccggagctgcagcccatcctcttcatgctgttcctgtccatgtacctggccacaatgctggggaacctgctcatcatcctggccgtcaactctgactcccacctccacacccccatgtacttcctcctctctatcctgtccttggtcgacatctgtttcacctccaccacgatgcccaagatgctggtgaacatccaggcacaggctcaatccatcaattacacaggctgcctcacccaaatctgctttgtcctggtttttgttggattggaaaatggaattctggtcatgatggcctatgatcgatttgtggccatctgtcacccactgaggtacaatgtcatcatgaaccccaaactctgtgggctgctgcttctgctgtccttcatcgttagtgtcctggatgctctgctgcacacgttgatggtgctacagctgaccttctgcatagacctggaaattccccactttttctgtgaactagctcatattctcaagctcgcctgttctgatgtcctcatcaataacatcctggtgtatttggtgaccagcctgttaggtgttgttcctctctctgggatcattttctcttacacacgaattgtctcctctgtcatgaaaattccatcagctggtggaaagtataaagctttttccatctgcgggtcacatttaatcgttgtttccttgttttatggaacagggtttggggtgtaccttagttctggggctacccactcctccaggaagggtgcaatagcatcagtgatgtataccgtggtcacccccatgctgaacccactcatttacagcctgaggaacaaagaagttaaaaaggccataaagaggttgttcaagagaaagtgctgcaggagaaggtgagcggccgc

SEQ ID NO: 623 - DNA, 1112 bp, synthetic construct
  source 1..1112: mol_type = other DNA; note = mmLucy-FLAG-rho-OR7G3(M29V)
ggatccgccaccatgagccaccagatcctgctgctcctggccctgctgaccctaggcctggctgattacaaggacgacgacgataagatcgaattgatgaacgggaccgagggcccaaacttctacgtgcctttctccaacaagacgggcgtggtggaattcatgaaagcaggaaacttctcagacactccagaattctttctcttgggattgtcaggggatccggagctgcagcccatcctcttcgtgctgttcctgtccatgtacctggccacaatgctggggaacctgctcatcatcctggccgtcaactctgactcccacctccacacccccatgtacttcctcctctctatcctgtccttggtcgacatctgtttcacctccaccacgatgcccaagatgctggtgaacatccaggcacaggctcaatccatcaattacacaggctgcctcacccaaatctgctttgtcctggtttttgttggattggaaaatggaattctggtcatgatggcctatgatcgatttgtggccatctgtcacccactgaggtacaatgtcatcatgaaccccaaactctgtgggctgctgcttctgctgtccttcatcgttagtgtcctggatgctctgctgcacacgttgatggtgctacagctgaccttctgcatagacctggaaattccccactttttctgtgaactagctcatattctcaagctcgcctgttctgatgtcctcatcaataacatcctggtgtatttggtgaccagcctgttaggtgttgttcctctctctgggatcattttctcttacacacgaattgtctcctctgtcatgaaaattccatcagctggtggaaagtataaagctttttccatctgcgggtcacatttaatcgttgtttccttgttttatggaacagggtttggggtgtaccttagttctggggctacccactcctccaggaagggtgcaatagcatcagtgatgtataccgtggtcacccccatgctgaacccactcatttacagcctgaggaacaaagaagttaaaaaggccataaagaggttgttcaagagaaagtgctgcaggagaaggtgagcggccgc

SEQ ID NO: 624 - DNA, 1109 bp, synthetic construct
  source 1..1109: mol_type = other DNA; note = mmLucy-FLAG-rho-OR8A1
ggatccgccaccatgagccaccagatcctgctgctcctggccctgctgaccctaggcctggctgattacaaggacgacgacgataagatcgaattgatgaacgggaccgagggcccaaacttctacgtgcctttctccaacaagacgggcgtggtggaattcatggctgcaggaaatcactctacagtgacagagttcattctcaagggtttaacgaagagagcagacctccagctccccctctttctcctcttcctcgggatctacttggtcaccatcgtggggaacctgggcatgatcactctaatttgtctgaactctcagctgcacacccccatgtactactttctcagcaatctgtcactcatggatctctgctactcctccgtcattacccctaagatgctggtgaactttgtgtcagagaaaaacatcatctcctacgcagggtgcatgtcacagctctacttcttccttgtttttgtcattgctgagtgttacatgctgacagtgatggcctacgaccgctatgttgccatctgccaccctttgctttacaacatcattatgtctcatcacacctgcctgctgctggtggctgtggtctacgccatcggactcattggctccacaatagaaactggcctcatgttaaaactgccctattgtgagcacctcatcagtcactacttctgtgacatcctccctctcatgaagctgtcctgctctagcacctatgatgttgagatgacagtcttcttttcggctggattcaacatcatagtcacgagcttaacagttcttgtttcttacaccttcattctctccagcatcctcggcatcagcaccacagaggggagatccaaagccttcagcacctgcagctcccaccttgcagccgtgggaatgttctatggatcaactgcattcatgtacttaaaaccctccacaatcagttccttgacccaggagaatgtggcctctgtgttctacaccacggtaatccccatgttgaatcccctaatctacagcctgaggaacaaagaagttaaaaaggccataaagaggttgttcaagagaaagtgctgcaggagaaggtgagcggccgc

SEQ ID NO: 625 - DNA, 1109 bp, synthetic construct
  source 1..1109: mol_type = other DNA; note = mmLucy-FLAG-rho-OR8B12
ggatccgccaccatgagccaccagatcctgctgctcctggccctgctgaccctaggcctggctgattacaaggacgacgacgataagatcgaattgatgaacgggaccgagggcccaaacttctacgtgcctttctccaacaagacgggcgtggtggaattcatggcagccaaaaactcttctgtgacagagtttatcctcgaaggcttaacccaccagccgggactgcggatccccctcttcttcctgtttctgggtttctacacggtcaccgtggtggggaacctgggcttgataaccctgattgggctgaactctcacctgcacactcccatgtacttcttcctttttaacctctctttaatagatttctgtttctccactaccatcactcccaaaatgctgatgagttttgtctcaaggaagaacatcatttccttcacagggtgtatgactcagctcttcttcttctgcttctttgtcgtctctgagtccttcatcctgtcagcgatggcgtatgaccgctacgtggccatctgtaacccactgttgtacacagtcaccatgtcttgccaggtgtgtttgctccttttgttgggtgcctatgggatggggtttgctggggccatggcccacacaggaagcataatgaacctgaccttctgtgctgacaaccttgtcaatcatttcatgtgtgacatccttcctctccttgagctctcctgcaacagctcttacatgaatgagctggtggtctttattgtggtggctgttgacgttggaatgcccattgtcactgtctttatttcttatgccctcatcctctccagcattctacacaacagttctacagaaggcaggtccaaagcctttagtacttgcagttcccacataattgtagtttctcttttctttggttctggtgctttcatgtatctcaaacccctttccatcctgcccctcgagcaagggaaagtgtcctccctgttctataccataatagtccccgtgttaaacccattaatctatagcttgaggaacaaagaagttaaaaaggccataaagaggttgttcaagagaaagtgctgcaggagaaggtgagcggccgc

SEQ ID NO: 626 - DNA, 1109 bp, synthetic construct
  source 1..1109: mol_type = other DNA; note = mmLucy-FLAG-rho-OR8B2
ggatccgccaccatgagccaccagatcctgctgctcctggccctgctgaccctaggcctggctgattacaaggacgacgacgataagatcgaattgatgaacgggaccgagggcccaaacttctacgtgcctttctccaacaagacgggcgtggtggaattcatgctggctagaaacaactccttagtgactgaatttattcttgctggattaacagatcatccagagttccggcaacccctctttttcctgtttctagtgatctacattgtcaccatggtaggcaaccttggcttgatcactcttttcggtctaaattctcacctccacacaccaatgtactatttcctcttcaatctctccttcattgatctctgttactcctctgttttcactcccaaaatgctaatgaactttgtgtcaaaaaagaatattatctccaatgttgggtgcatgactcggctgtttttctttctctttttcgtcatctctgaatgttacatgttgacttcaatggcatatgatcgctatgtggccatctgtaatccattgctgtataaggtcaccatgtcccatcaggtctgttctatgctcacttttgctgcttacataatgggattggctggagccacggcccacaccgggtgcatgcttagactcaccttctgcagtgctaatatcatcaaccattacttgtgtgacatactccccctcctccagctttcctgcaccagcacctatgtcaacgaggtggttgttctcattgttgtgggtactaatatcacggtacccagttgtaccatcctcatttcttatgttttcattgtcactagcattcttcatatcaaatccactcaaggaagatcaaaagccttcagtacttgtagctctcatgtcattgctctgtctctgttttttgggtcagcggcattcatgtatattaaatattcttctggatctatggagcagggaaaagtttcttctgttttctacactaatgtggtgcccatgctcaatcccctcatctacagtttgaggaacaaagaagttaaaaaggccataaagaggttgttcaagagaaagtgctgcaggagaaggtgagcggccgc

SEQ ID NO: 627 - DNA, 1109 bp, synthetic construct
  source 1..1109: mol_type = other DNA; note = mmLucy-FLAG-rho-OR8B3
ggatccgccaccatgagccaccagatcctgctgctcctggccctgctgaccctaggcctggctgattacaaggacgacgacgataagatcgaattgatgaacgggaccgagggcccaaacttctacgtgcctttctccaacaagacgggcgtggtggaattcatgctggctagaaacaactccttagtgactgaatttattcttgctggattaacagatcgtccagagttccggcaacccctctttttcctgtttctagtggtctacattgtcaccatggtaggcaaccttggcttgatcattcttttcggtctaaattctcacctccacacaccaatgtactatttcctcttcaatctctccttcattgatctctgttactcctctgttttcactcccaaaatgctaatgaactttgtatcaaaaaagaatattatctcctatgttgggtgcatgactcagctgtttttctttctcttttttgtcatctctgaatgttacatgttgacctcaatggcatatgatcgctatgtggccatctgtaatccattgctgtataaggtcaccatgtcccatcaggtctgttctatgctcacttttgctgcttacataatgggattggctggagccacggcccacaccgggtgcatgcttagactcaccttctgcagtgctaatatcatcaaccattacttgtgtgacatactccccctcctccagctttcctgcaccagcacctatgtcaacgaggtggttgttctcattgttgtgggtattaatatcatggtacccagttgtaccatcctcatttcttatgttttcattgtcactagcattcttcatatcaaatccactcaaggaagatcaaaagccttcagtacttgtagctctcatgtcattgctctgtctctgttttttgggtcagcggcattcatgtatattaaatattcttctggatctatggagcagggaaaagtttcttctgttttctacactaatgtggtgcccatgctcaatcctctcatctacagtttgaggaacaaagaagttaaaaaggccataaagaggttgttcaagagaaagtgctgcaggagaaggtgagcggccgc

SEQ ID NO: 628 - DNA, 1109 bp, synthetic construct
  source 1..1109: mol_type = other DNA; note = mmLucy-FLAG-rho-OR8B4(E22G)
ggatccgccaccatgagccaccagatcctgctgctcctggccctgctgaccctaggcctggctgattacaaggacgacgacgataagatcgaattgatgaacgggaccgagggcccaaacttctacgtgcctttctccaacaagacgggcgtggtggaattcatgactctgagaaacagctcctcagtgactgagtttatccttgtgggattatcagaacagccagggctccagctccctcttttccttctattcttagggatctatgtgttcactgtggtgggcaacttgggcttgatcaccttaattgggataaatcctagccttcacacccccatgtactttttcctcttcaacttgtcctttatagatctctgttattcctgtgtgtttacccccaaaatgctgaatgactttgtttcagaaagtatcatctcttatgtgggatgtatgactcagctatttttcttctgtttctttgtcaattctgagtgctatgtgttggtatcaatggcctatgatcgctatgtggccatctgcaaccccctgctctacatggtcaccatgtccccaagggtctgctttctgctgatgtttggttcctatgtggtagggtttgctggggccatggcccacactggaagcatgctgcgactgaccttctgtgattccaacgtcattgaccattatctgtgtgacgttctccccctcttgcagctctcctgcaccagcacccatgtcagtgagctggtatttttcattgttgttggagtaatcaccatgctatccagcataagcatcgtcatctcttacgctttgatactctccaacatcctctgtattccttctgcagagggcagatccaaagcctttagcacatggggctcccacataattgctgttgctctgttttttgggtcagggacattcacctacttaacaacatcttttcctggctctatgaaccatggcagatttgcctcagtcttttacaccaatgtggttcccatgcttaacccttcgatctacagtttgaggaacaaagaagttaaaaaggccataaagaggttgttcaagagaaagtgctgcaggagaaggtgagcggccgc

SEQ ID NO: 629 - DNA, 1109 bp, synthetic construct
  source 1..1109: mol_type = other DNA; note = mmLucy-FLAG-rho-OR8B4(Y131H,C140F,C178R)
ggatccgccaccatgagccaccagatcctgctgctcctggccctgctgaccctaggcctggctgattacaaggacgacgacgataagatcgaattgatgaacgggaccgagggcccaaacttctacgtgcctttctccaacaagacgggcgtggtggaattcatgactctgagaaacagctcctcagtgactgagtttatccttgtgggattatcagaacagccagagctccagctccctcttttccttctattcttagggatctatgtgttcactgtggtgggcaacttgggcttgatcaccttaattgggataaatcctagccttcacacccccatgtactttttcctcttcaacttgtcctttatagatctctgttattcctgtgtgtttacccccaaaatgctgaatgactttgtttcagaaagtatcatctcttatgtgggatgtatgactcagctatttttcttctgtttctttgtcaattctgagtgctatgtgttggtatcaatggcctatgatcgctatgtggccatctgcaaccccctgctccacatggtcaccatgtccccaagggtcttctttctgctgatgtttggttcctatgtggtagggtttgctggggccatggcccacactggaagcatgctgcgactgaccttctgtgattccaacgtcattgaccattatctgcgtgacgttctccccctcttgcagctctcctgcaccagcacccatgtcagtgagctggtatttttcattgttgttggagtaatcaccatgctatccagcataagcatcgtcatctcttacgctttgatactctccaacatcctctgtattccttctgcagagggcagatccaaagcctttagcacatggggctcccacataattgctgttgctctgttttttgggtcagggacattcacctacttaacaacatcttttcctggctctatgaaccatggcagatttgcctcagtcttttacaccaatgtggttcccatgcttaacccttcgatctacagtttgaggaacaaagaagttaaaaaggccataaagaggttgttcaagagaaagtgctgcaggagaaggtgagcggccgc

SEQ ID NO: 630 - DNA, 1112 bp, synthetic construct
  source 1..1112: mol_type = other DNA; note = mmLucy-FLAG-rho-OR8B8
ggatccgccaccatgagccaccagatcctgctgctcctggccctgctgaccctaggcctggctgattacaaggacgacgacgataagatcgaattgatgaacgggaccgagggcccaaacttctacgtgcctttctccaacaagacgggcgtggtggaattcatggctgctgagaattcctccttcgtgacacagtttatcctcgcaggcttaactgaccaaccgggagtccagatccccctcttcttcctgtttctaggcttctacgtggtcactgtggtggggaacctgggcttgataaccctgataaggctcaactctcacttgcacacccctatgtacttcttcctctataacttgtccttcatagatttctgctattccagtgttatcactcccaaaatgctgatgagctttgtcttaaagaagaacagcatctcctacgcagggtgtatgactcagctcttcttctttcttttctttgttgtctctgagtccttcatcctgtcagcaatggcgtatgaccgctatgtggccatctgtaacccactgttgtacatggtcaccatgtctccccaggtgtgttttctccttttgttgggtgtctatgggatggggtttgctggggccatggcccacacagcgtgcatgatgggtgtgaccttctgtgccaataaccttgtcaaccactacatgtgtgacatccttccccttcttgagtgtgcttgcaccagcacctatgtgaatgagcttgtagtgtttgttgttgtgggcattgatattggtgtgcccacagtcaccatcttcatttcctatgctctcattctctccagcatcttccacattgattccacggagggcaggtccaaagccttcagcacctgcagctcccacataattgcagtttctctgttctttgggtcaggagcattcatgtacctcaaacccttttctcttttagctatgaaccagggcaaggtgtcttccctattctataccactgtggtgcccatgctcaacccattaatttatagcctgaggaacaaagaagttaaaaaggccataaagaggttgttcaagagaaagtgctgcaggagaaggtgagcggccgc

SEQ ID NO: 631 - DNA, 1112 bp, synthetic construct
  source 1..1112: mol_type = other DNA; note = mmLucy-FLAG-rho-OR8D1
ggatccgccaccatgagccaccagatcctgctgctcctggccctgctgaccctaggcctggctgattacaaggacgacgacgataagatcgaattgatgaacgggaccgagggcccaaacttctacgtgcctttctccaacaagacgggcgtggtggaattcatgaccatggaaaattattctatggcagctcagtttgtcttagatggtttaacacagcaagcagagctccagctgcccctcttcctcctgttcctgggaatctatgtggtcacagtagtgggcaacctgggcatgattctcctgattgcagtcagccctctacttcacacccccatgtactatttcctcagcagcttgtccttcgtcgatttctgctattcctctgtcattactcccaaaatgctggtgaacttcctaggaaagaagaatacaatcctttactctgagtgcatggtccagctctttttctttgtggtctttgtggtggctgagggttacctcctgactgccatggcatatgatcgctatgttgccatctgtagcccactgctttataatgcgatcatgtcctcatgggtctgctcactgctagtgctggctgccttcttcttgggctttctctctgccttgactcatacaagtgccatgatgaaactgtccttttgcaaatcccacattatcaaccattacttctgtgatgttcttcccctcctcaatctctcctgctccaacacacacctcaatgagcttctactttttatcattgcggggtttaacaccttggtgcccaccctagctgttgctgtctcctatgccttcatcctctacagcatccttcacatccgctcctcagagggccggtccaaagcttttggaacatgcagctctcatctcatggctgtggtgatcttctttgggtccattaccttcatgtatttcaagcccccttcaagtaactccctggaccaggagaaggtgtcctctgtgttctacaccacggtgatccccatgctgaaccctttaatatacagtctgaggaacaaagaagttaaaaaggccataaagaggttgttcaagagaaagtgctgcaggagaaggtgagcggccgc

SEQ ID NO: 632 - DNA, 1112 bp, synthetic construct
  source 1..1112: mol_type = other DNA; note = mmLucy-FLAG-rho-OR8D2
ggatccgccaccatgagccaccagatcctgctgctcctggccctgctgaccctaggcctggctgattacaaggacgacgacgataagatcgaattgatgaacgggaccgagggcccaaacttctacgtgcctttctccaacaagacgggcgtggtggaattcatggctacttcaaaccattcttcaggggctgagtttatcctggcaggcttgacacaacgcccagaacttcaactgccactcttcctcctgttccttggaatatatgtggtcacagtggtggggaacctgggcatgatcttcttaattgctctcagttctcaactttaccctccagtgtattattttctcagtcatttgtctttcattgatctctgctactcctctgtcattacccctaagatgctggtgaactttgttccagaggagaacattatctcctttctggaatgcattactcaactttatttcttccttatttttgtaattgcagaaggctaccttctgacagccatggaatatgaccgttatgttgctatctgtcgcccactgctttacaatattgtcatgtcccacagggtctgttccataatgatggctgtggtatactcactgggttttctgtgggccacagtccatactacccgcatgtcagtgttgtcattctgtaggtctcatacggtcagtcattatttttgtgatattctccccttattgactctgtcttgctccagcacccacatcaatgagattctgctgttcattattggaggagttaataccttagcaactacactggcggtccttatctcttatgctttcattttctctagtatccttggtattcattccactgaggggcaatccaaagcctttggcacttgtagctcccatctcttggctgtgggcatcttttttgggtctataacattcatgtatttcaagcccccttccagcactactatggaaaaagagaaggtgtcttctgtgttctacatcacaataatccccatgctgaatcctctaatctatagcctgaggaacaaagaagttaaaaaggccataaagaggttgttcaagagaaagtgctgcaggagaaggtgagcggccgc

SEQ ID NO: 633 - DNA, 1112 bp, synthetic construct
  source 1..1112: mol_type = other DNA; note = mmLucy-FLAG-rho-OR8D4(R133K,L283P)
ggatccgccaccatgagccaccagatcctgctgctcctggccctgctgaccctaggcctggctgattacaaggacgacgacgataagatcgaattgatgaacgggaccgagggcccaaacttctacgtgcctttctccaacaagacgggcgtggtggaattcatgggtgtaaaaaaccattccacagtgactgagtttcttctttcaggattaactgaacaagcagagcttcagctgcccctcttctgcctcttcttaggaatttacacagttactgtggtgggaaacctcagcatgatctcaattattaggctgaatcgtcaacttcatacccccatgtactatttcctgagtagtttgtcttttttagatttctgctattcttctgtcattacccctaaaatgctatcagggtttttatgcagagatagatccatctcctattctggatgcatgattcagctgttttttttctgtgtttgtgttatttctgaatgctacatgctggcagccatggcctgcgatcgctacgtggccatctgcagcccactgctctacaaggtcatcatgtcccctagggtctgttctctgctggtggctgctgtcttctcagtaggtttcactgatgctgtgatccatggaggttgtatactcaggttgtctttctgtggatcaaacatcattaaacattatttctgtgacattgtccctcttattaaactctcctgctccagcacttatattgatgagcttttgatttttgtcattggtggatttaacatggtggccacaagcctaacaatcattatttcatatgcttttatcctcaccagcatcctgcgcatccactctaaaaagggcaggtgcaaagcgtttagcacctgtagctcccacctgacagctgttcttatgttttatgggtctctgatgtccatgtatctcaaacctgcttctagcagttcactcacccaggagaaagtatcctcagtattttataccactgtgattcccatgttgaatcccttgatatatagtctgaggaacaaagaagttaaaaaggccataaagaggttgttcaagagaaagtgctgcaggagaaggtgagcggccgc

SEQ ID NO: 634 - DNA, 1112 bp, synthetic construct
  source 1..1112: mol_type = other DNA; note = mmLucy-FLAG-rho-OR8G1(stop259Y)
ggatccgccaccatgagccaccagatcctgctgctcctggccctgctgaccctaggcctggctgattacaaggacgacgacgataagatcgaattgatgaacgggaccgagggcccaaacttctacgtgcctttctccaacaagacgggcgtggtggaattcatgtcaggagaaaataattcctcagtgactgagttcattctggctgggctctcagaacagccagagctccagctgcccctcttcctcctgttcttaggaatctatgtggtcacagtggtgggcaacctgggcatgaccacactgatttggctcagttctcacctgcacacccctatgtactatttcctcagcagtctgtccttcattgacttctgccattccactgtcattacccctaagatgctggtgaactttgtgacagagaagaacatcatctcctaccctgaatgcatgactcagctctacttcttcctcgtttttgctattgcagagtgtcacatgttggctgcaatggcgtatgaccgttacatggccatctgtagccccttgctgtacagtgtcatcatatccaataaggcttgcttttctctgattttaggggtgtatataataggcctggtttgtgcatcagttcatacaggctgtatgtttagggttcaattctgcaaatttgatttgattaaccattatttctgtgatcttcttcccctcctaaagctctcttgctctagtatctatgtcaacaaactacttattctatgtgttggtgcatttaacatccttgtccccagcctgaccatcctttgctcttacatctttattattgccagcatcctccacattcgctccactgagggcaggtccaaagccttcagcacttgtagctcccacatgttggcggttgtaatcttttttggatctgcagcattcatgtacttgcagccatcttcaatcagctccatggaccaggggaaagtatcctctgtgttttatactattattgtgcccatgttgaaccctctgatttatagcctgaggaacaaagaagttaaaaaggccataaagaggttgttcaagagaaagtgctgcaggagaaggtgagcggccgc

SEQ ID NO: 635 - DNA, 1112 bp, synthetic construct
  source 1..1112: mol_type = other DNA; note = mmLucy-FLAG-rho-OR8G5
ggatccgccaccatgagccaccagatcctgctgctcctggccctgctgaccctaggcctggctgattacaaggacgacgacgataagatcgaattgatgaacgggaccgagggcccaaacttctacgtgcctttctccaacaagacgggcgtggtggaattcatggcagcagaaaaccattcttttgtgactaagtttattctggttgggctaacagagaagtcagagctacagctgcccctcttcctcgtcttcctgggaatctatgtagtcacagtgctggggaacctgggcatgatcacactgattgggctcagttctcacctgcacacacctatgtactgtttcctcagcagtctgtccttcattgacttctgccattccactgtcattacccctaagatgctggtgaactttgtgacagagaagaacatcatctcctaccctgaatgcatgactcagctctacttcttcctcgtttttgctattgcagagtgtcacatgttggctgcaatggcatatgacggctacgtggccatctgtagccccttgctgtacagcatcatcatatccaataaggcttgcttttctctgattttagtggtgtatgtaataggcctgatttgtgcgtcagctcatataggctgtatgtttagggttcaattctgcaaatttgatgtgatcaaccattatttctgtgatcttatttctatcttgaagctctcctgttctagtacttacattaatgagttactgattttaatctttagtggaattaacatccttgtccccagcctgaccatcctcagctcttacatcttcatcattgccagcatcctccgcattcgctacactgagggcaggtccaaagccttcagcacttgcagctcccacatctcggctgtttctgttttctttgggtctgcagcattcatgtacctgcagccatcatctgtcagctccatggaccaggggaaagtgtcctctgtgttttatactattgttgtgcccatgctgaaccccctgatctacagcctgaggaacaaagaagttaaaaaggccataaagaggttgttcaagagaaagtgctgcaggagaaggtgagcggccgc

SEQ ID NO: 636 - DNA, 1112 bp, synthetic construct
  source 1..1112: mol_type = other DNA; note = mmLucy-FLAG-rho-OR8G5(G204E)
ggatccgccaccatgagccaccagatcctgctgctcctggccctgctgaccctaggcctggctgattacaaggacgacgacgataagatcgaattgatgaacgggaccgagggcccaaacttctacgtgcctttctccaacaagacgggcgtggtggaattcatggcagcagaaaaccattcttttgtgactaagtttattctggttgggctaacagagaagtcagagctacagctgcccctcttcctcgtcttcctgggaatctatgtagtcacagtgctggggaacctgggcatgatcacactgattgggctcagttctcacctgcacacacctatgtactgtttcctcagcagtctgtccttcattgacttctgccattccactgtcattacccctaagatgctggtgaactttgtgacagagaagaacatcatctcctaccctgaatgcatgactcagctctacttcttcctcgtttttgctattgcagagtgtcacatgttggctgcaatggcatatgacggctacgtggccatctgtagccccttgctgtacagcatcatcatatccaataaggcttgcttttctctgattttagtggtgtatgtaataggcctgatttgtgcgtcagctcatataggctgtatgtttagggttcaattctgcaaatttgatgtgatcaaccattatttctgtgatcttatttctatcttgaagctctcctgttctagtacttacattaatgagttactgattttaatctttagtgaaattaacatccttgtccccagcctgaccatcctcagctcttacatcttcatcattgccagcatcctccgcattcgctacactgagggcaggtccaaagccttcagcacttgcagctcccacatctcggctgtttctgttttctttgggtctgcagcattcatgtacctgcagccatcatctgtcagctccatggaccaggggaaagtgtcctctgtgttttatactattgttgtgcccatgctgaaccccctgatctacagcctgaggaacaaagaagttaaaaaggccataaagaggttgttcaagagaaagtgctgcaggagaaggtgagcggccgc

SEQ ID NO: 637 - DNA, 1109 bp, synthetic construct
  source 1..1109: mol_type = other DNA; note = mmLucy-FLAG-rho-OR8H1
ggatccgccaccatgagccaccagatcctgctgctcctggccctgctgaccctaggcctggctgattacaaggacgacgacgataagatcgaattgatgaacgggaccgagggcccaaacttctacgtgcctttctccaacaagacgggcgtggtggaattcatgggtagaagaaataacacaaatgtgcctgacttcatccttacgggactgtcagattctgaagaggtccagatggccctctttatactatttctcctgatatacctaattactatgctgggcaatgtggggatgatattgataatccgcctggacctccagcttcacactcccatgtattttttccttactcacttgtcatttattgacctcagttactcaactgtcatcacacctaaaaccttagcgaacttactgacttccaactatatttccttcatgggctgctttgcccagatgttcttttttgtcttcttgggagctgctgaatgttttcttctctcatcaatggcctatgatcgctacgtagctatctgcagtcctctacgttacccagttattatgtccaaaaggctgtgttgcgctcttgtcactgggccctatgtgattagctttatcaactcctttgtcaatgtggtttggatgagcagactgcatttctgcgactcaaatgtagttcgtcactttttctgcgacacgtctccaattttagctctgtcctgcatggacacatacgacattgaaatcatgatacacattttagctggttccaccctgatggtgtcccttatcacaatatctgcatcctatgtgtccattctctctaccatcctgaaaattaattccacttcaggaaagcagaaagctttgtctacttgtgcctctcatctcttgggagtcaccatcttttatggaactatgatttttacttatttaaaaccaagaaagtcttattctttgggaagggatcaagtggcttctgttttttatactattgtgattcccatgctgaatccactcatttatagtcttaggaacaaagaagttaaaaaggccataaagaggttgttcaagagaaagtgctgcaggagaaggtgagcggccgc

SEQ ID NO: 638 - DNA, 1112 bp, synthetic construct
  source 1..1112: mol_type = other DNA; note = mmLucy-FLAG-rho-OR8H2
ggatccgccaccatgagccaccagatcctgctgctcctggccctgctgaccctaggcctggctgattacaaggacgacgacgataagatcgaattgatgaacgggaccgagggcccaaacttctacgtgcctttctccaacaagacgggcgtggtggaattcatgatgggtagaaggaataacacaaatgtggctgacttcatccttatgggactgacactttctgaagagatccagatggctctgtttatgctatttctcctgatatacctaattactatgctggggaatgtggggatgatattgataatccgcctggacctccagcttcacactcccatgtattttttccttactcacctgtcatttattgacctcagttactcaactgtcgtcacacctaaaaccttagcgaacttactgacttccaactatatttcctttacgggctgctttgcccagatgttcttttttgccttcttgggtactgctgaatgttaccttctctcctcaatggcctatgatcgctatgcagcgatctgcagtcctctacactacacagttattatgtccaaaaggctctgcctcgctctcatcactgggccttatgtgattggctttatagactcctttgtcaacgtggtttccatgagcagattgcatttctgcgactcaaacgtaattcatcactttttctgtgacacttccccaattttagctctgtcctgcactgatacatacaacaccgaaatcctgatattcattattgttggttccaccctgatggtgtcccttttcacaatatctgcatcctatgtgttcattctctttaccatcctgaaaattaattccacttcaggaaagcagaaagctttctctacttgcgtctctcatctcttgggagtcaccatcttttatagcactctgatttttacttatttaaaaccaagaaagtcttattccttgggaagagatcaagtggcttctgttttttatactattgtgattcccatgctgaatccactcatttatagtcttaggaacaaagaagttaaaaaggccataaagaggttgttcaagagaaagtgctgcaggagaaggtgagcggccgc

SEQ ID NO: 639 - DNA, 1112 bp, synthetic construct
  source 1..1112: mol_type = other DNA; note = mmLucy-FLAG-rho-OR8H3(P137S)
ggatccgccaccatgagccaccagatcctgctgctcctggccctgctgaccctaggcctggctgattacaaggacgacgacgataagatcgaattgatgaacgggaccgagggcccaaacttctacgtgcctttctccaacaagacgggcgtggtggaattcatgatgggtagaaggaatgacacaaatgtggctgacttcatccttacgggactgtcagactctgaagaggtccagatggctctgtttatgctatttctcctcatatacctaattactatgctggggaatgtggggatgctattgataatccgcctggacctccagcttcacactcccatgtattttttccttactcacctgtcatttattgacctcagttactcaactgtcgtcacacctaaaaccttagcgaacttactgacttccaactatatttccttcacgggctgctttgcccagatgttctgttttgtcttcttgggtactgctgaatgttatcttctctcctcaatggcctatgatcgctatgcagcgatctgcagtcctctacactacacagttattatgtccaaaaggctctgcctcgctctcatcactgggccttatgtgattggctttatggactcctttgtcaatgtggtttccatgagcagattgcatttctgtgactcaaacataattcatcactttttctgtgacacttccccaattttagctctgtcctgcactgacacagacaacactgaaatgctgatattcattatcgctggttccaccctgatggtgtcccttatcacaatatctgcatcctatgtgtccattctctctaccatcctgaaaattaattccacttcaggaaagcagaaagctttctctacttgcgtctctcatctcttgggagtcaccatcttctatggaactatgatttttacttacttaaagccaagaaagtcttattccttgggaagagatcaagtggctcctgtgttttatactattgtgattcccatgctgaatccactcatttatagtcttaggaacaaagaagttaaaaaggccataaagaggttgttcaagagaaagtgctgcaggagaaggtgagcggccgc

SEQ ID NO: 640 - DNA, 1109 bp, synthetic construct
  source 1..1109: mol_type = other DNA; note = mmLucy-FLAG-rho-OR8I2
ggatccgccaccatgagccaccagatcctgctgctcctggccctgctgaccctaggcctggctgattacaaggacgacgacgataagatcgaattgatgaacgggaccgagggcccaaacttctacgtgcctttctccaacaagacgggcgtggtggaattcatggctggcaacaatttcactgaggttaccgtcttcatcctctctggatttgcaaatcaccctgaattacaagtcagtcttttcttgatgtttctcttcatttatctattcactgttttgggaaacctgggactgatcacgttaatcagaatggattctcagcttcacacccctatgtactttttcctgagcaatttagcatttattgacatattttactcctctactgtaacacctaaggcattggtgaatttccaatccaatcggagatccatctcctttgttggctgctttgttcaaatgtacttttttgttggattggtgtgttgtgagtgtttccttctgggatcaatggcctacaatcgctacatagcaatctgcaatcccttactgtattcagtagtcatgtcccaaaaagtgtccaactggctgggagtaatgccatatgtgataggcttcacaagctcgctgatatctgtctgggtgataagcagtttggcgttctgtgattccagcatcaatcattttttttgtgacaccacagctcttttagcactctcctgtgtagatacattcggcacagaaatggtgagctttgtcttagctggattcactcttcttagctctctccttatcatcacagtcacttatatcatcatcatctcagccatcctgaggatccagtcagcagcaggcaggcagaaggccttctccacctgcgcatcccacctcatggctgtaactatcttttatgggtctctgattttcacctatttgcaacctgataacacatcatcgctgacccaggcgcaggtggcatctgtattctatacgattgtcattcccatgctgaatccactcatctacagtctgaggaacaaagaagttaaaaaggccataaagaggttgttcaagagaaagtgctgcaggagaaggtgagcggccgc

SEQ ID NO: 641 - DNA, 1115 bp, synthetic construct
  source 1..1115: mol_type = other DNA; note = mmLucy-FLAG-rho-OR8J1
ggatccgccaccatgagccaccagatcctgctgctcctggccctgctgaccctaggcctggctgattacaaggacgacgacgataagatcgaattgatgaacgggaccgagggcccaaacttctacgtgcctttctccaacaagacgggcgtggtggaattcatggctcctgaaaatttcaccagagtcactgagtttattcttacaggtgtctctagctgtccagagctccagattcccctcttcctggtctttctggtgctctatgggctgaccatggcagggaacctgggcatcatcaccctcaccagtgttgactctcgacttcaaacccccatgtactttttcctgcaacatctggctctcattaatcttggtaactctactgtcattgcccctaaaatgctgattaactttttagtaaagaagaaaactacctcattctatgaatgtgccacccaactgggagggttcttgttctttattgtatcggaggtaatcatgctggctttgatggcctatgaccgctatgtggctatttgtaaccctctgctgtacatggtggtggtgtctcggcggctctgcctcctgctggtctccctcacatacctctatggcttttctacagctattgtggtttcatcttatgtattctctgtgtcttattgctcttctaatataatcaatcatttttactgtgataatgttcctctgttagcattatcttgctctgatacttacttaccagaaacagttgtctttatatctgcagcaacaaatgtggttggttccttgattatagttctagtatcttatttcaatattgttttgtctattttaaaaatatgttcatcagaaggaaggaaaaaagccttttctacctgtgcttcacatatgatggcagtcacaattttttatgggacattgctattcatgtatgtgcagccccgaagtaaccattcactggatactgatgataagatggcttctgtgttttacacgttggtaattcctatgctgaatcccttgatctacagcctgaggaacaaagaagttaaaaaggccataaagaggttgttcaagagaaagtgctgcaggagaaggtgagcggccgc

SEQ ID NO: 642 - DNA, 1112 bp, synthetic construct
  source 1..1112: mol_type = other DNA; note = mmLucy-FLAG-rho-OR8J3
ggatccgccaccatgagccaccagatcctgctgctcctggccctgctgaccctaggcctggctgattacaaggacgacgacgataagatcgaattgatgaacgggaccgagggcccaaacttctacgtgcctttctccaacaagacgggcgtggtggaattcatggctcctgaaaatttcaccagggtcactgagtttattctcacaggtgtctctagctgtccagagctccagattcccctcttcctggtcttcctagtgctctatgtgctgaccatggcagggaacctgggcatcatcaccctcaccagtgttgactctcgacttcaaaaccccatgtactttttcctgagacatctagctatcatcaatcttggcaactctactgtcattgcccctaaaatgctgatgaactttttagtaaagaagaaaactacctcattctatgaatgtgccacccaactgggagggttcttgttctttattgtatcggaggtaatgatgctggctgtgatggcctatgaccgctatgtggccatttgtaaccctctgctctacatggtggtggtgtctcggcggctctgcctcctgctggtgtccctcacatacctctatggcttttctacagctattgtggtttcaccttgtatattctctgtgtcttattgctcttctaatataatcaatcatttttactgtgatattgcacctctgttagcattatcttgctctgatacttacataccagaaacaatagtctttatatctgcagcaacaaatttggttttttccatgattacagttctagtatcttatttcaatattgttttgtccattctaaggatacgttcaccagaaggaaggaaaaaagccttttccacctgcgcttcgcatatgatagcagtcacggttttctatgggacaatgctatttatgtatttgcagccccaaaccaaccactcactggatactgataagatggcttctgtgttttacacattggtgattcctatgctgaatcccttgatctacagcctgaggaacaaagaagttaaaaaggccataaagaggttgttcaagagaaagtgctgcaggagaaggtgagcggccgc

SEQ ID NO: 643 - DNA, 1130 bp, synthetic construct
  source 1..1130: mol_type = other DNA; note = mmLucy-FLAG-rho-OR8K1
ggatccgccaccatgagccaccagatcctgctgctcctggccctgctgaccctaggcctggctgattacaaggacgacgacgataagatcgaattgatgaacgggaccgagggcccaaacttctacgtgcctttctccaacaagacgggcgtggtggaattcatgaatcatgtggtaaaacacaatcacacggcagtgaccaaggtgactgaatttattctcatggggattacagacaaccctgggctgcaggctccactgtttggactcttcctcatcatatatctggtcacagtgataggcaatctgggcatggttatcttgacctacttggactccaagctacacacccccatgtactttttccttagacatttgtcaatcactgatcttggttactccactgtcattgccccgaagatgttagtaaacttcatagtgcacaaaaacacaatttcttacaattggtatgccactcagctagcattctttgagattttcatcatctctgagctctttattctatcagcaatggcctatgatcgctacgtagccatctgtaaacctcttctgtacgtgatcatcatggcagagaaagtactttgggtgctggtaattgttccctatctctatagcacgtttgtgtcactatttctcacaattaagttatttaaactgtccttctgtggctcaaacataatcagctatttttactgtgactgtatccctctgatgtccatactctgttctgacacaaatgaattagaattaataattttgatcttctcaggctgtaatttgctcttctccctctcaattgttctcatatcctacatgtttattctagtggccattctcagaatgaactcaaggaaagggaggtacaaagccttctccacctgtagctctcatctgacagtggtgatcatgttctatgggacattgttatttatttacttgcaacccaagtccagtcatactttggctattgataaaatggcctcagtgttttataccctgttgattcctatgctgaatccgttgatctacagcctaaggaacaaagaagttaaaaaggccataaagaggttgttcaagagaaagtgctgcaggagaaggtgagcggccgc

SEQ ID NO: 644 - DNA, 1109 bp, synthetic construct
  source 1..1109: mol_type = other DNA; note = mmLucy-FLAG-rho-OR8K3(L122R)
ggatccgccaccatgagccaccagatcctgctgctcctggccctgctgaccctaggcctggctgattacaaggacgacgacgataagatcgaattgatgaacgggaccgagggcccaaacttctacgtgcctttctccaacaagacgggcgtggtggaattcatggaacaacacaatctaacaacggtgaatgaattcattcttacgggaatcacagatatcgctgagctgcaggcaccattatttgcattgttcctcatgatctatgtgatctcagtgatgggcaatttgggcatgattgtcctcaccaagttggactccaggttgcaaacccctatgtacttttttctcagacatctggctttcatggatcttggttattcaacaactgtgggacccaaaatgttagtaaattttgttgtggataagaatataatttcttattatttttgtgcaacacagctagctttctttcttgtgttcattggtagtgaactttttattctctcagccatgtcctacgaccgctatgtggccatctgtaaccctctgctatacacagtaatcatgtcacgaagggtatgtcaggtgctggtagcaatcccttacctctattgcacattcatttctcttctagtcaccataaagatttttactttatccttctgtggctacaacgtcattagtcatttctactgtgacagtctccctttgttacctttgctttgttcaaatacacatgaaattgaattgataattctgatctttgcagctattgatttgatttcatctcttctgatagttcttttatcttacctgctcatccttgtagccattctcaggatgaattctgctggcagacaaaaggctttttctacctgtggagcccacctgacagtggtcatagtgttctatgggactttgcttttcatgtacgtgcagcccaagtccagtcattcctttgacactgataaagtggcttccatattttacaccctggttatccccatgttgaatcccttgatctatagtttaaggaacaaagaagttaaaaaggccataaagaggttgttcaagagaaagtgctgcaggagaaggtgagcggccgc

SEQ ID NO: 645 - DNA, 1112 bp, synthetic construct
  source 1..1112: mol_type = other DNA; note = mmLucy-FLAG-rho-OR8K5
ggatccgccaccatgagccaccagatcctgctgctcctggccctgctgaccctaggcctggctgattacaaggacgacgacgataagatcgaattgatgaacgggaccgagggcccaaacttctacgtgcctttctccaacaagacgggcgtggtggaattcatgggccaacacaatctaacagtgctaactgaattcattctgatggaactcacaaggcggcctgagctgcagattcccctttttggagtcttcctcgtcatctacctaatcacagtggtgggcaacctaactatgatcattttgaccaaactggactcccacttacatacacctatgtacttttctatcagacatttggcttttgttgatcttggtaattctactgtcatttgtcccaaggtgctggcaaattttgttgtggatcgaaatactatttcctattatgcatgtgctgcacagctggcattcttccttatgttcattatcagtgaatttttcatcctgtcagccatggcctatgaccgctatgtggccatttgtaaccctctgctctattatgttattatgtctcagcgactgtgtcatgtactggtgggcattcaatatctctacagcacatttcaggctctgatgttcactattaagatttttacattgaccttctgtggctctaatgtcatcagtcatttttactgtgatgatgttcctttgctacctatgctttgctcaaatgcacaggaaatagaattgttgagcatactattttctgtatttaatttgatctcctcctttctgatagtcttagtgtcctacatgttgattttgttagctatatgtcaaatgcattctgcagagggcaggaaaaaggctttctccacatgtggttcccatttgacagtggtggttgtgttctatgggtctctactcttcatgtacatgcagcccaattccactcacttctttgatactgataaaatggcttctgtgttttacactttagtaatccccatgcttaaccctttgatttacagcttaaggaacaaagaagttaaaaaggccataaagaggttgttcaagagaaagtgctgcaggagaaggtgagcggccgc

SEQ ID NO: 646 - DNA, 1106 bp, synthetic construct
  source 1..1106: mol_type = other DNA; note = mmLucy-FLAG-rho-OR8S1(M48V,L82P,A198T)
ggatccgccaccatgagccaccagatcctgctgctcctggccctgctgaccctaggcctggctgattacaaggacgacgacgataagatcgaattgatgaacgggaccgagggcccaaacttctacgtgcctttctccaacaagacgggcgtggtggaattcatggccttggggaatcacagcaccatcaccgagttcctcctccttgggctgtctgccgaccccaacatccgggctctgctctttgtgctgttcctggggatttacctcctgaccataatggaaaacctgatgctgctgctcgtgatcagggctgattcttgtctccataagcccatgtatttcttcctgagtcacctctcttttgttgatctctgcttctcttcagtcattgtgcccaagatgccggagaacctcctgtcacagaggaaaaccatttcagtagagggctgcctggctcaggtcttctttgtgtttgtcactgcagggactgaagcctgccttctctcagggatggcctatgaccgccatgctgccatctgccgcccactactttatggacagatcatgggtaaacagctgtatatgcaccttgtgtggggctcatggggactgggctttctggacgcactcatcaatgtcctcctagctgtaaacatggtcttttgtgaagccaaaatcattcaccactacagctatgagatgccatccctcctccctctgtcctgctctgatatctccagaagcctcatcaccttgctctgctccactctcctacatgggctgggaaacttccttttggtcttcttatcctacacccgtataatctctaccatcctaagcatcagctctacctcgggcagaagcaaggccttctccacctgctctgcccacctcactgcagtgacactttactatggctcaggtttgctccgccatctcatgccaaactcaggttcccccatagagttgatcttctctgtgcagtatactgtagtcactcccatgctgaattccctcatctatagcctgaggaacaaagaagttaaaaaggccataaagaggttgttcaagagaaagtgctgcaggagaaggtgagcggccgc

SEQ ID NO: 647 - DNA, 1112 bp, synthetic construct
  source 1..1112: mol_type = other DNA; note = mmLucy-FLAG-rho-OR8U1
ggatccgccaccatgagccaccagatcctgctgctcctggccctgctgaccctaggcctggctgattacaaggacgacgacgataagatcgaattgatgaacgggaccgagggcccaaacttctacgtgcctttctccaacaagacgggcgtggtggaattcatggctcacatcaattgcacccaggcgacagagtttattcttgtgggcctcacagaccatcaggagttgaagatgcccctctttgtgctattcttatccatctacctcttcacagtggtaggcaacttgggtttgatcctactcattagagcggatacaagtctcaacacaccaatgtacttctttcttagcaacctagcttttgtggatttctgttactcttctgtcattacacccaaaatgcttgggaatttcttgtacaaacaaaatgttatatcctttgatgcatgtgctactcaactgggctgctttctcaccttcatgatatcagaatccttgctactggcttccatggcctatgaccgatatgtggccatttgtaaccctctattgtatatggttgtaatgactccaggaatctgcattcaacttgtagcagttccttatagctatagcttcctaatggcactatttcacaccatcctcaccttccgcctctcctattgccactccaacattgtcaaccatttctattgtgatgacatgcctctcctcaggctaacttgctcagacactcgcttcaaacagctctggatctttgcctgtgctggtatcatgttcatttcctcccttctgattgtctttgtctcctacatgttcatcatttctgccatcctgaggatgcattcagctgagggaagacagaaggctttctcgacgtgtggctctcacatgctggcagtcaccatattctatgggaccctcatttttatgtacttacagcctagctctagccatgccctggacacagacaagatggcctctgtcttctacacagtgatcattcccatgttgaatcccttaatctatagcctcaggaacaaagaagttaaaaaggccataaagaggttgttcaagagaaagtgctgcaggagaaggtgagcggccgc

SEQ ID NO: 648 - DNA, 1112 bp, synthetic construct
  source 1..1112: mol_type = other DNA; note = mmLucy-FLAG-rho-OR8U8
ggatccgccaccatgagccaccagatcctgctgctcctggccctgctgaccctaggcctggctgattacaaggacgacgacgataagatcgaattgatgaacgggaccgagggcccaaacttctacgtgcctttctccaacaagacgggcgtggtggaattcatggctcacatcaattgcacccaggcgacagagtttattcttgtgggcctcacagaccatcaggagttgaagatgcccctctttgtgctattcttatccatctacctcttcacagtggtaggcaacttgggtttgatcctactcattagagcggatacaagtctcaacacaccaatgtacttctttcttagcaacctagcttttgtggatttctgttactcttctgtcattacacccaaaatgcttgggaatttcttgtacaaacaaaatgttatatcctttgatgcatgtgctactcaactgggctgctttctcaccttcatgatatcagaatccttgctactggcttccatggcctatgaccgatatgtggccatttgtaaccctctattgtatatggttgtaatgactccaggaatctgcattcaacttgtagcagttccttatagctatagcttcctaatggcactatttcacaccatcctcaccttccgcctctcctattgccactccaacattgtcaaccatttctattgtgatgacatgcctctcctcaggctaacttgctcagacactcgcttcaaacagctatggattttggcctgtgctggtatcacattcatctgctctgttctgattgtctttgtctcctacatgttcattatttttgccatcctgaggatgagctcagctgaaggaagacgcaaagccttctccacctgtagctctcacatgctggcagtcaccatattctatggcaccctgatctttatgtacttacaaccaagctcaagccattctcttgatgcagacaagatggcctctgtcttctacacggtgattattcccatgttgaatcccttgatttacagtctcaggaacaaagaagttaaaaaggccataaagaggttgttcaagagaaagtgctgcaggagaaggtgagcggccgc

SEQ ID NO: 649 - DNA, 1112 bp, synthetic construct
  source 1..1112: mol_type = other DNA; note = mmLucy-FLAG-rho-OR8U9
ggatccgccaccatgagccaccagatcctgctgctcctggccctgctgaccctaggcctggctgattacaaggacgacgacgataagatcgaattgatgaacgggaccgagggcccaaacttctacgtgcctttctccaacaagacgggcgtggtggaattcatgactcagatcaattgcacccaggtgacagagtttattcttgtgggcctcacagatcgtcaggagttgaagatgcccctctttgtgctattcttatctatctatcttttcacagtagtaggcaatctgggtttgatcctactcattagaacagatgaaaaactcaacacaccaatgtacttctttcttagcaacctagcttttgtggatttctgttactcttctgtcattacacccaaaatgcttgggaatttcttatataaacaaaatagtatttcgttcaatgcatgtgctgctcagttaggctgtttcctggccttcatgacggctgagtgcttgctactggcttccatggcctatgaccgatatgtggccatttgtaaccctctgatgtatatggtggtaatgtccccaggaatctgcattcagcttgtggctgctccccatagctatagcatcttggttgcactgtttcacaccatcctcaccttccgcctctcctattgccactccaacattgtcaaccatttctattgtgatgacatgcctctcctcaggctaacttgctcagacactcgcttcaaacagctctggatctttgcctgtgctggtatcatgttcatttcctcccttctgattgtctttgtctcctacatgttcatcatttctgccatcctgaggatgcattcagctgagggaagacagaaggctttctcgacgtgtggctctcacatgctggcagtcaccatattctatgggaccctcatttttatgtacttacagcctagctctagccatgccctggacacagacaagatggcctctgtcttctacacagtgatcattcccatgttgaatcccttaatctatagcctcaggaacaaagaagttaaaaaggccataaagaggttgttcaagagaaagtgctgcaggagaaggtgagcggccgc

SEQ ID NO: 650 - DNA, 1100 bp, synthetic construct
  source 1..1100: mol_type = other DNA; note = mmLucy-FLAG-rho-OR9A2
ggatccgccaccatgagccaccagatcctgctgctcctggccctgctgaccctaggcctggctgattacaaggacgacgacgataagatcgaattgatgaacgggaccgagggcccaaacttctacgtgcctttctccaacaagacgggcgtggtggaattcatgatggacaaccactctagtgccactgaattccaccttctaggcttccctgggtcccaaggactacaccacattctttttgctatattctttttcttctatttagtgacattaatgggaaacacggtcatcattgtgattgtctgtgtggataaacgtctgcagtcccccatgtatttcttcctcagccacctctctaccctggagatcctggtcacaaccataattgtccccatgatgctttggggattgctcttcctgggatgcagacagtatctttctctacatgtatcgctcaacttttcctgtgggaccatggagtttgcattacttggagtgatggctgtggaccgttatgtggctgtgtgtaaccctttgaggtacaacatcattatgaacagcagtacctgtatttgggtggtaatagtgtcatgggtgtttggatttctttctgaaatctggcccatctatgccacatttcagtttaccttccgcaaatcaaattcattagaccatttttactgtgaccgagggcaattgctcaaactgtcctgcgataacactcttctcacagagtttatccttttcttaatggctgtttttattctcattggttctttgatccctacgattgtctcctacacctacattatctccaccatcctcaagatcccgtcagcctctggccggaggaaagccttctccacttttgcctcccacttcacctgtgttgtgattggctatggcagctgcttgtttctctacgtgaaacccaagcaaacacagggagttgagtacaataagatagtttccctgttggtttctgtgttaacccccttcctgaatcctttcatctttactcttaggaacaaagaagttaaaaaggccataaagaggttgttcaagagaaagtgctgcaggagaaggtgagcggccgc

SEQ ID NO: 651 - DNA, 1112 bp, synthetic construct
  source 1..1112: mol_type = other DNA; note = mmLucy-FLAG-rho-OR9A4
ggatccgccaccatgagccaccagatcctgctgctcctggccctgctgaccctaggcctggctgattacaaggacgacgacgataagatcgaattgatgaacgggaccgagggcccaaacttctacgtgcctttctccaacaagacgggcgtggtggaattcatgttgatgaattactctagtgccactgaattttatctccttggcttccctggctctgaagaactacatcatatcctttttgctatattcttctttttctacttggtgacattaatgggaaacacagtcatcatcatgattgtctgtgtggataaacgtctgcagtcccccatgtatttcttcctcggccacctctctgccctggagatcctggtcacaaccataatcgtccccgtgatgctttggggattgctgctccctgggatgcagacaatatatttgtctgcctgtgttgtccagctcttcttgtaccttgctgtggggacaacagagttcgcattacttggagcaatggctgtggaccgttatgtggctgtctgtaaccctctgaggtacaacatcattatgaacagacacacctgcaactttgtggttcttgtgtcatgggtgtttgggtttctttttcaaatctggccggtctatgtcatgtttcagcttacttactgcaaatcaaatgtggtgaacaattttttttgtgaccgagggcaattgctcaaactatcctgcaataatactcttttcacggagtttatcctcttcttaatggctgtttttgttctctttggttctttgatccctacaattgtctccaacgcctacatcatctccaccattctcaagatcccgtcatcctctggccggaggaaatccttctccacttgtgcctcccacttcacctgtgttgtgattggctacggcagctgcttgtttctctacgtgaaacccaagcaaacgcaggcagctgattacaattgggtagtttccctgatggtttcagtagtaactcctttcctcaatcctttcatcttcaccctcaggaacaaagaagttaaaaaggccataaagaggttgttcaagagaaagtgctgcaggagaaggtgagcggccgc

SEQ ID NO: 652 - DNA, 1109 bp, synthetic construct
  source 1..1109: mol_type = other DNA; note = mmLucy-FLAG-rho-OR9G1(T62I)
ggatccgccaccatgagccaccagatcctgctgctcctggccctgctgaccctaggcctggctgattacaaggacgacgacgataagatcgaattgatgaacgggaccgagggcccaaacttctacgtgcctttctccaacaagacgggcgtggtggaattcatgcagaggagcaatcatacagtgactgagtttatactgctgggcttcaccacagacccaggaatgcagctgggcctcttcgtggtgttcctgggcgtgtactctctcactgtggtaggaaatagcaccctcatcgtgttgatctgtaatgactcctgcctccacacacccatgtattttttcattggaaatctgtcgtttctggatctctggtattcttctgtctacaccccaaagatcctagtgacctgcatctctgaagacaaaagcatctcctttgctggctgcctgtgtcagttcttcttctctgcagggctggcctatagtgagtgctacctgctggctgccgtggcttatgaccgctacgtggccatctccaagcccctgctttatgcccaggccatgtccataaagctgtgtgcattgctggtagcagtctcatattgtggtggctttattaactcttcaatcatcaccaagaaaacgttttcctttaacttctgccgtgaaaacatcattgatgactttttctgtgatttgcttcccttggtggagctggcctgtggcgagaagggcggctataaaattatgatgtacttcctgctggcctccaatgtcatctgccccgcagtgctcatcctggcctcctacctctttatcatcaccagtgtcttgaggatctcctcctccaagggctacctcaaagccttctccacatgctcctcccacctgacctctgtcactttatactatggctccattctctacatctacgctctccccagatctagctattcttttgatatggacaaaatagtttctacattttacactgtggtattccccatgttgaatctcatgatctacagcctaaggaacaaagaagttaaaaaggccataaagaggttgttcaagagaaagtgctgcaggagaaggtgagcggccgc

SEQ ID NO: 653 - DNA, 1112 bp, synthetic construct
  source 1..1112: mol_type = other DNA; note = mmLucy-FLAG-rho-OR9G4(N191D)
ggatccgccaccatgagccaccagatcctgctgctcctggccctgctgaccctaggcctggctgattacaaggacgacgacgataagatcgaattgatgaacgggaccgagggcccaaacttctacgtgcctttctccaacaagacgggcgtggtggaattcatggaagtgggaaattgcaccatcctgactgaattcatcttgttgggtttctcagcagattcccagtggcagccgattctatttggagtgtttctgatgctctatttgataaccttgtcaggaaacatgaccttggttatcttaatccgaactgattcccacttgcatacacctatgtactttttcattggcaatctgtcttttttggatttctggtatacctctgtgtatacccccaaaatcctggccagttgtgtctcagaagataagcgcatttccttggctggatgtggggctcagctgtttttttcctgtgttgtagcctacactgaatgctatctcctggcagccatggcatatgaccgccatgcagcaatttgtaacccattgctttattcaggtaccatgtccaccgccctctgtactgggcttgttgctggctcctacataggaggatttttgaatgccatagcccatactgccaatacattccgcctgcatttttgtggtaaaaatatcattgaccactttttctgtgatgcaccaccattggtaaaaatgtcctgtacagacaccagggtctacgaaaaagtcctgcttggtgtggtgggcttcacagtactctccagcattcttgctatcctgatttcctatgtcaacatcctcctggctatcctgagaatccactcagcttcaggaagacacaaggcattctccacctgtgcttcccacctcatctcagtcatgctcttctatggatcattgttgtttatgtattcaaggcctagttccacctactccctagagagggacaaagtagctgctctgttctacaccgtgatcaacccactgctcaaccctctcatctatagcctgaggaacaaagaagttaaaaaggccataaagaggttgttcaagagaaagtgctgcaggagaaggtgagcggccgc

SEQ ID NO: 654 - DNA, 1109 bp, synthetic construct
  source 1..1109: mol_type = other DNA; note = mmLucy-FLAG-rho-OR9G9
ggatccgccaccatgagccaccagatcctgctgctcctggccctgctgaccctaggcctggctgattacaaggacgacgacgataagatcgaattgatgaacgggaccgagggcccaaacttctacgtgcctttctccaacaagacgggcgtggtggaattcatgcagaggagcaatcacacagtgactgagtttatactgctgggcttcaccacagacccagggatgcagctgggcctcttcgtggtgttcctgggcgtgtactctctcactgtggtaggaaatagcaccctcatcgtgttgatctgtaatgactcccacctccacacacccatgtattttgtcgttggaaatctgtcgtttctggatctctggtattcttctgtctacaccccaaagatcctagtgatctgcatctctgaagacaaaagcatctcctttgctggctgcctgtgtcagttcttcttctctgcagggctggcctatagtgagtgctgcttactggctgccatggcttatgaccgctacgtggccatctccaagcccctgctttatgcccaggccatgtccataaagctgtgtgcattgctggtagcagtctcatattgtggtggctttattaactcttcaatcatcaccaagaaaacgttttcctttaacttctgctgtgaaaacatcattgatgactttttctgtgatttacttcccttggtgaagctggcctgtggcgagaagggctgctataagtttctgatgtacttcctgctggcctccaatgtcatctgccccgcggtgctcatcctggcctcctacctctttatcatcaccagtgtcttgaggatctcctcctcccagggccgcctcaaagccttctccacatgctcctcccacctgacctctgtcactttatactatggctccattctctacatctatgctctccctagatctagctattcttttgatatggacaaaatagtttctacattttatactgaggtactccccatgttgaatcccatgatctacagcctaaggaacaaagaagttaaaaaggccataaagaggttgttcaagagaaagtgctgcaggagaaggtgagcggccgc

SEQ ID NO: 655 - DNA, 1112 bp, synthetic construct
  source 1..1112: mol_type = other DNA; note = mmLucy-FLAG-rho-OR9I1
ggatccgccaccatgagccaccagatcctgctgctcctggccctgctgaccctaggcctggctgattacaaggacgacgacgataagatcgaattgatgaacgggaccgagggcccaaacttctacgtgcctttctccaacaagacgggcgtggtggaattcatggccaagaataatctcaccagagtaaccgaattcattctcatgggctttatggaccaccccaaattggagattcccctctttctggtgtttctgagtttctacctagtcacccttcttgggaatgtggggatgattatgttaatccaagtagatgtcaaactctacaccccaatgtacttcttcctgagccacctctccctgctggatgcctgttacacctcagtcatcacccctcagatcctagccacattggccacaggcaaaacggtcatctcctacggccactgtgctgcccagttctttttattcaccatctgtgcaggcacagagtgctttctgctggcagtgatggcctatgatcgctatgctgccattcgcaacccactgctctataccgtggccatgaatcccaggctctgctggagcctggtggtaggagcctatgtctgtggggtgtcaggagccatcctgcgtaccacttgcaccttcaccctctccttctgtaaggacaatcaaataaacttcttcttctgtgacctcccacccctgctgaagcttgcctgcagtgacacagcaaacatcgagattgtcatcatcttctttggcaattttgtgattttggccaatgcctccgtcatcctgatttcctatctgctcatcatcaagaccattttgaaagtgaagtcttcaggtggcagggccaagactttctccacatgtgcctctcacatcactgctgtggcccttttctttggagcccttatcttcatgtatctgcaaagtggctcaggcaaatctctggaggaagacaaagtcgtgtctgtcttctatacagtggtcatccccatgctgaaccctctgatctacagcttaaggaacaaagaagttaaaaaggccataaagaggttgttcaagagaaagtgctgcaggagaaggtgagcggccgc

SEQ ID NO: 656 - DNA, 1115 bp, synthetic construct
  source 1..1115: mol_type = other DNA; note = mmLucy-FLAG-rho-OR9K2
ggatccgccaccatgagccaccagatcctgctgctcctggccctgctgaccctaggcctggctgattacaaggacgacgacgataagatcgaattgatgaacgggaccgagggcccaaacttctacgtgcctttctccaacaagacgggcgtggtggaattcatgggtgacaggggaacaagcaatcactcagaaatgactgacttcattcttgcaggcttcagggtacgcccagagctccacattctcctcttcctgctatttttgtttgtttatgccatgatccttctagggaatgttgggatgatgaccattattatgactgatcctcggctgaacacaccaatgtattttttcctaggcaatctctccttcattgatcttttctattcatctgttattgaacccaaggctatgatcaacttctggtctgaaaacaagtctatctcctttgcaggctgtgtggcccagctctttctctttgccctcctcattgtgactgagggatttctcctggcggccatggcttatgaccgctttattgccatctgcaaccctctgctctactctgttcaaatgtccacacgtctgtgtactcagttggtggctggttcctatttttgtggctgcattagctcagttattcagactagcatgacatttactttatctttttgcgcttctcgggctgttgaccacttttactgtgattctcgcccacttcagagactgtcttgttctgatctctttatccatagaatgatatctttttccttatcatgtattattatcttgcctactatcatagtcattatagtatcttacatgtatattgtgtccacagttctaaagatacattctactgagggacataagaaggccttctccacctgcagctctcacctgggagttgtgagtgtgctgtatggtgctgtcttttttatgtatctcactcctgacagatttcctgagctgagtaaagtggcatccttatgttactccctagtcactcccatgttgaatcctttgatttactctctgaggaacaaagaagttaaaaaggccataaagaggttgttcaagagaaagtgctgcaggagaaggtgagcggccgc

SEQ ID NO: 657 - DNA, 1115 bp, synthetic construct
  source 1..1115: mol_type = other DNA; note = mmLucy-FLAG-rho-OR9K2(R23C,E81A,R185H)
ggatccgccaccatgagccaccagatcctgctgctcctggccctgctgaccctaggcctggctgattacaaggacgacgacgataagatcgaattgatgaacgggaccgagggcccaaacttctacgtgcctttctccaacaagacgggcgtggtggaattcatgggtgacaggggaacaagcaatcactcagaaatgactgacttcattcttgcaggcttcagggtatgcccagagctccacattctcctcttcctgctatttttgtttgtttatgccatgatccttctagggaatgttgggatgatgaccattattatgactgatcctcggctgaacacaccaatgtattttttcctaggcaatctctccttcattgatcttttctattcatctgttattgcacccaaggctatgatcaacttctggtctgaaaacaagtctatctcctttgcaggctgtgtggcccagctctttctctttgccctcctcattgtgactgagggatttctcctggcggccatggcttatgaccgctttattgccatctgcaaccctctgctctactctgttcaaatgtccacacgtctgtgtactcagttggtggctggttcctatttttgtggctgcattagctcagttattcagactagcatgacatttactttatctttttgcgcttctcgggctgttgaccacttttactgtgattctcacccacttcagagactgtcttgttctgatctctttatccatagaatgatatctttttccttatcatgtattattatcttgcctactatcatagtcattatagtatcttacatgtatattgtgtccacagttctaaagatacattctactgagggacataagaaggccttctccacctgcagctctcacctgggagttgtgagtgtgctgtatggtgctgtcttttttatgtatctcactcctgacagatttcctgagctgagtaaagtggcatccttatgttactccctagtcactcccatgttgaatcctttgatttactctctgaggaacaaagaagttaaaaaggccataaagaggttgttcaagagaaagtgctgcaggagaaggtgagcggccgc

SEQ ID NO: 658 - DNA, 1109 bp, synthetic construct
  source 1..1109: mol_type = other DNA; note = mmLucy-FLAG-rho-OR9Q1
ggatccgccaccatgagccaccagatcctgctgctcctggccctgctgaccctaggcctggctgattacaaggacgacgacgataagatcgaattgatgaacgggaccgagggcccaaacttctacgtgcctttctccaacaagacgggcgtggtggaattcatggcagagatgaacctcaccttggtgaccgagttcctccttattgcattcactgaatatcctgaatgggcactccctctcttcctcttgtttttatttatgtatctcatcaccgtattggggaacttagagatgattattctgatcctcatggatcaccagctccacgctccaatgtatttccttctgagtcacctcgctttcatggacgtctgctactcatctatcactgtcccccagatgctggcagtgctgctggagcatggggcagctttatcttacacacgctgtgctgctcagttctttctgttcaccttctttggttccatcgactgctacctcttggccctcatggcctatgaccgctacttggctgtgtgccagcccctgctttatgtcaccatcctgacacagcaggcccgcttgagtcttgtggctggggcttacgttgctggtctcatcagtgccttggtgcggacagtctcagccttcactctctccttctgtggaaccagtgagattgactttattttctgtgacctccctcctctgttaaagttgacctgtggggagagctacactcaagaagtgctgattattatgtttgccatttttgtcatccctgcttccatggtggtgatcttggtgtcctacctgtttatcatcgtggccatcatggggatccctgctggaagccaggccaagaccttctccacctgcacctcccacctcactgctgtgtcactcttctttggtaccctcatcttcatgtacttgagaggtaactcagatcagtcttcggagaagaatcgggtagtgtctgtgctttacacagaggtcatccccatgttgaatcccctcatctacagcctgaggaacaaagaagttaaaaaggccataaagaggttgttcaagagaaagtgctgcaggagaaggtgagcggccgc

SEQ ID NO: 659 - DNA, 1112 bp, synthetic construct
  source 1..1112: mol_type = other DNA; note = mmLucy-FLAG-rho-OR9Q2
ggatccgccaccatgagccaccagatcctgctgctcctggccctgctgaccctaggcctggctgattacaaggacgacgacgataagatcgaattgatgaacgggaccgagggcccaaacttctacgtgcctttctccaacaagacgggcgtggtggaattcatggctgaaaggaattacaccgtagtgacggagttcttccttactgcatttactgaacatctccagtggagggttcctctcttcctcatatttttgagtttctatcttgccactatgttagggaacacaggcatgatcctcctgatccgtggcgatcgtcggctccacaccccgatgtacttcttcctcagccacctttccttggtggacatctgctactcgtccgccatcatccctcagatgctggctgtgctgtgggagcacggcacaaccatctcccaggctcgctgtgcagctcagttcttcctcttcaccttctttgcctccatcgactgctaccttctggccatcatggcctatgaccgctacacggccgtgtgccagcccctgctttatgtcaccatcataaccgagaaggcccgctggggcctagtcactggggcttacgttgctggttttttcagtgcctttgttcgaacggtcacagccttcactctctccttttgtggaaacaatgagatcaacttcattttctgtgacctccctcctctattaaaactctcctgtggggacagctacactcaggaagtggtgattattgtgtttgctcttttcgtcatgcctgcctgtatcttggtgatcttggtatcctacctgtttatcattgtggccatcctgcagatccactctgctggaggccgggccaagaccttctccacctgcgcctcccacctcactgccgtcgctcttttctttggcaccctcatcttcatgtacctgcgagacaacacaggccagtcctccgagggagaccgagtggtgtctgtgctctacacggtggtgaccccaatgctgaatccccttatctatagcctgaggaacaaagaagttaaaaaggccataaagaggttgttcaagagaaagtgctgcaggagaaggtgagcggccgc

SEQ ID NO: 660 - DNA, 1112 bp, synthetic construct
  source 1..1112: mol_type = other DNA; note = mmLucy-FLAG-rho-OR10A3
ggatccgccaccatgagccaccagatcctgctgctcctggccctgctgaccctaggcctggctgattacaaggacgacgacgataagatcgaattgatgaacgggaccgagggcccaaacttctacgtgcctttctccaacaagacgggcgtggtggaattcatgaaaagacaaaatcaaagctgtgtggttgaattcatcctcctgggcttttctaactttcctgagctccaggtgcagctctttggggttttcctagttatttatgtggtgaccctgatgggaaatgccatcattacagtcatcatctccttaaaccagagcctccacgttcccatgtacctgttcctcctgaacctatctgtggtggaggtgagtttcagtgcagtcattacgcctgaaatgctggtggtgctctctactgagaaaactatgatttcttttgtgggctgttttgcacagatgtatttcatccttctttttggtgggactgaatgttttctcctgggagcgatggcttatgaccgatttgctgcaatttgccatcctctgaactacccagtgattatgaacagaggggtttttatgaaattagtaatattctcatggatctcagggatcatggtggctactgtgcagaccacttgggtatttagttttccattttgtggccccaatgaaattaatcatctcttctgtgagactcccccggtactagagcttgtgtgtgcagacaccttcttatttgaaatctatgccttcacaggcaccattttgattgttatggttcctttcttgttgatcctcttgtcttacattcgagttctgtttgccatcctgaagatgccatcaactactgggagacaaaaggccttttccacctgtgcctctcacctcacatctgtgaccctgttctatggcacagccaatatgacttatttacaacccaaatctggctactcacccgaaaccaagaaactgatctcattggcttacacgttgcttacccctctgctcaatccgctcatctatagcttaaggaacaaagaagttaaaaaggccataaagaggttgttcaagagaaagtgctgcaggagaaggtgagcggccgc

SEQ ID NO: 661 - DNA, 1115 bp, synthetic construct
  source 1..1115: mol_type = other DNA; note = mmLucy-FLAG-rho-OR10A4
ggatccgccaccatgagccaccagatcctgctgctcctggccctgctgaccctaggcctggctgattacaaggacgacgacgataagatcgaattgatgaacgggaccgagggcccaaacttctacgtgcctttctccaacaagacgggcgtggtggaattcatgatgtgggaaaactggacaattgtcagtgaatttgttctcgtgagcttctcagccctgtccactgagcttcaggctctactgtttctccttttcttgaccatttacttggttactttaatgggcaatgtcctcatcatcctggtcactatagctgactctgcactacaaagtcctatgtacttcttcctcagaaacttgtccttcctggagataggtttcaacttggtcattgtgcccaagatgctggggaccctgatcattcaagacacaaccatctccttccttggatgtgccactcagatgtatttcttcttcttttttggggctgctgagtgctgcctcctggccaccatggcatatgaccgctacgtggccatctgtgaccccttgcactacccagtcatcatgggccacatatcctgtgcccagctggcagctgcctcttggttctcagggttttcagtggccactgtgcaaaccacatggattttcagtttccctttttgtggccccaacagggtgaaccacttcttctgtgacagccctcctgttattgcactggtctgtgctgacacctctgtgtttgaactggaggctctgacagccactgtcctattcattctctttcctttcttgctgatcctgggatcctatgtccgcatcctctccactatcttcaggatgccgtcagctgaggggaaacatcaggcattctccacctgttccgcccacctcttggttgtctctctcttctatagcactgccatcctcacgtatttccgaccccaatccagtgcctcttctgagagcaagaagctgctgtcactctcttccacagtggtgactcccatgttgaaccccatcatctacagctcaaggaacaaagaagttaaaaaggccataaagaggttgttcaagagaaagtgctgcaggagaaggtgagcggccgc

SEQ ID NO: 662 - DNA, 1115 bp, synthetic construct
  source 1..1115: mol_type = other DNA; note = mmLucy-FLAG-rho-OR10A4(R262Q)
ggatccgccaccatgagccaccagatcctgctgctcctggccctgctgaccctaggcctggctgattacaaggacgacgacgataagatcgaattgatgaacgggaccgagggcccaaacttctacgtgcctttctccaacaagacgggcgtggtggaattcatgatgtgggaaaactggacaattgtcagtgaatttgttctcgtgagcttctcagccctgtccactgagcttcaggctctactgtttctccttttcttgaccatttacttggttactttaatgggcaatgtcctcatcatcctggtcactatagctgactctgcactacaaagtcctatgtacttcttcctcagaaacttgtccttcctggagataggtttcaacttggtcattgtgcccaagatgctggggaccctgatcattcaagacacaaccatctccttccttggatgtgccactcagatgtatttcttcttcttttttggggctgctgagtgctgcctcctggccaccatggcatatgaccgctacgtggccatctgtgaccccttgcactacccagtcatcatgggccacatatcctgtgcccagctggcagctgcctcttggttctcagggttttcagtggccactgtgcaaaccacatggattttcagtttccctttttgtggccccaacagggtgaaccacttcttctgtgacagccctcctgttattgcactggtctgtgctgacacctctgtgtttgaactggaggctctgacagccactgtcctattcattctctttcctttcttgctgatcctgggatcctatgtccgcatcctctccactatcttcaggatgccgtcagctgaggggaaacatcaggcattctccacctgttccgcccacctcttggttgtctctctcttctatagcactgccatcctcacgtatttccaaccccaatccagtgcctcttctgagagcaagaagctgctgtcactctcttccacagtggtgactcccatgttgaaccccatcatctacagctcaaggaacaaagaagttaaaaaggccataaagaggttgttcaagagaaagtgctgcaggagaaggtgagcggccgc

SEQ ID NO: 663 - DNA, 1115 bp, synthetic construct
  source 1..1115: mol_type = other DNA; note = mmLucy-FLAG-rho-OR10A5
ggatccgccaccatgagccaccagatcctgctgctcctggccctgctgaccctaggcctggctgattacaaggacgacgacgataagatcgaattgatgaacgggaccgagggcccaaacttctacgtgcctttctccaacaagacgggcgtggtggaattcatggctataggaaactggacagaaataagtgaatttatcctcatgagcttctcttccctacctactgaaatacagtcattgctcttcctgacatttctaactatctatttggttactctgaagggaaacagcctcatcattctggttaccctagctgaccccatgctacacagccccatgtacttcttcctcagaaacttatctttcctggagattggcttcaacctagtcattgtgcccaaaatgctggggaccctgcttgcccaggacacaaccatctccttccttggctgtgccactcagatgtatttcttcttcttctttggggtagctgaatgcttcctcctggctaccatggcatatgaccgctatgtggccatctgcagtcccttgcactacccagtcatcatgaaccaaaggacacgggccaaactggctgctgcttcctggttcccaggctttcctgtagctactgtgcagaccacatggctcttcagttttccattctgtggcaccaacaaggtgaaccacttcttctgtgacagcccgcctgtgctgaagctggtctgtgcagacacagcactgtttgagatctacgccatcgtcggaaccattctggtggtcatgatcccctgcttgctgatcttgtgttcctatactcgcattgctgctgctatcctcaagatcccatcagctaaagggaagcataaagccttctctacgtgctcctcacacctccttgttgtctctcttttctatatatcttctagcctcacctacttctggcctaaatcaaataattctcctgagagcaagaagttgttatcattatcctacactgttgtgactcccatgttgaaccccattatctacagcttgaggaacaaagaagttaaaaaggccataaagaggttgttcaagagaaagtgctgcaggagaaggtgagcggccgc

SEQ ID NO: 664 - DNA, 1112 bp, synthetic construct
  source 1..1112: mol_type = other DNA; note = mmLucy-FLAG-rho-OR10A6(A117V,V140G,L287P)
ggatccgccaccatgagccaccagatcctgctgctcctggccctgctgaccctaggcctggctgattacaaggacgacgacgataagatcgaattgatgaacgggaccgagggcccaaacttctacgtgcctttctccaacaagacgggcgtggtggaattcatggaaagacaaaatcaaagctgtgtggttgaattcatcctcttgggcttttctaactatcctgagctccaggggcagctctttgtggctttcctggttatttatctggtgaccctgataggaaatgccattattatagtcatcgtctccctagaccagagcctccacgttcccatgtacctgtttctcctgaacttatctgtggtggacctgagtttcagtgcagttattatgcctgaaatgctggtggtcctctctactgaaaaaactacaatttcttttgggggctgttttgcacagatgtatttcatccttctttttggtggggctgaatgttttcttctgggagtaatggcttatgaccgatttgctgcaatttgccatcctctcaactaccaaatgattatgaataaaggaggttttatgaaattaattatattttcatgggccttaggttttatgttaggtactgttcaaacatcatgggtatctagttttcccttttgtggccttaatgaaattaaccatatatcttgtgaaaccccagcagtgttagaacttgcatgtgcagacacgtttttgtttgaaatctatgcattcacaggcacctttttgattattttggttcctttcttgttgatactcttgtcttacattcgagttctgtttgccatcctgaagatgccatcaaccactgggagacaaaaggccttttccacctgtgccgctcacctcacatctgtgaccctattctatggcacagccagtatgacttatttacaacccaaatctggctactcaccggaaaccaagaaagtgatgtcattgtcttactcacttctgacaccactgctgaatccgcttatctacagtttgaggaacaaagaagttaaaaaggccataaagaggttgttcaagagaaagtgctgcaggagaaggtgagcggccgc

SEQ ID NO: 665 - DNA, 1112 bp, synthetic construct
  source 1..1112: mol_type = other DNA; note = mmLucy-FLAG-rho-OR10A6(L287P)
ggatccgccaccatgagccaccagatcctgctgctcctggccctgctgaccctaggcctggctgattacaaggacgacgacgataagatcgaattgatgaacgggaccgagggcccaaacttctacgtgcctttctccaacaagacgggcgtggtggaattcatggaaagacaaaatcaaagctgtgtggttgaattcatcctcttgggcttttctaactatcctgagctccaggggcagctctttgtggctttcctggttatttatctggtgaccctgataggaaatgccattattatagtcatcgtctccctagaccagagcctccacgttcccatgtacctgtttctcctgaacttatctgtggtggacctgagtttcagtgcagttattatgcctgaaatgctggtggtcctctctactgaaaaaactacaatttcttttgggggctgttttgcacagatgtatttcatccttctttttggtggggctgaatgttttcttctgggagcaatggcttatgaccgatttgctgcaatttgccatcctctcaactaccaaatgattatgaataaaggagtttttatgaaattaattatattttcatgggccttaggttttatgttaggtactgttcaaacatcatgggtatctagttttcccttttgtggccttaatgaaattaaccatatatcttgtgaaaccccagcagtgttagaacttgcatgtgcagacacgtttttgtttgaaatctatgcattcacaggcacctttttgattattttggttcctttcttgttgatactcttgtcttacattcgagttctgtttgccatcctgaagatgccatcaaccactgggagacaaaaggccttttccacctgtgccgctcacctcacatctgtgaccctattctatggcacagccagtatgacttatttacaacccaaatctggctactcaccggaaaccaagaaagtgatgtcattgtcttactcacttctgacaccactgctgaatccgcttatctacagtttgaggaacaaagaagttaaaaaggccataaagaggttgttcaagagaaagtgctgcaggagaaggtgagcggccgc

SEQ ID NO: 666 - DNA, 1112 bp, synthetic construct
  source 1..1112: mol_type = other DNA; note = mmLucy-FLAG-rho-OR10A7
ggatccgccaccatgagccaccagatcctgctgctcctggccctgctgaccctaggcctggctgattacaaggacgacgacgataagatcgaattgatgaacgggaccgagggcccaaacttctacgtgcctttctccaacaagacgggcgtggtggaattcatgatctgtgaaaatcacaccagagtcactgaatttattcttcttggttttacaaacaaccccgagatgcaagtttccctctttatttttttcctggccatttatacagtcactttgttgggcaactttcttattgtcacagttaccagtgtggatctcgcacttcaaacacccatgtacttctttcttcaaaatctgtcacttcttgaagtatgtttcaccttggttatggtgccaaaaatgcttgtagatctagtgtccccaaggaaaattatctcttttgtgggctgtggtacccagatgtacttcttcttcttctttggcagttctgaatgtttccttctctccatgatggcttatgatcgctttgtggccatctgtaaccctctccattattcagtcataatgaacaggtccctatgcttgtggatggccataggctcttggatgtccggtgttcctgtgtctatgctacagacagcttggatgatggcccttcctttctgtggaccaaatgccgtggaccactttttctgtgatggtcccccagtgttaaaactagtcacagtggatacaaccatgtatgaaatgcaagcacttgcctccacactcctgtttatcatgtttcccttttgtctcattttggtttcctacacccgcattatcataacaattctgaggatgtcctctgccactggccgccagaaggcattttctacttgttcctcacacctcattgtggtgtccctcttctacggaacagccagtctgacctacctgcggcccaaatcaaaccagtcccctgagagcaagaagctagtgtcattgtcctacactgtcatcacacctatgctaaaccccatcatctacggcctgaggaacaaagaagttaaaaaggccataaagaggttgttcaagagaaagtgctgcaggagaaggtgagcggccgc

SEQ ID NO: 667 - DNA, 1115 bp, synthetic construct
  source 1..1115: mol_type = other DNA; note = mmLucy-FLAG-rho-OR10AD1
ggatccgccaccatgagccaccagatcctgctgctcctggccctgctgaccctaggcctggctgattacaaggacgacgacgataagatcgaattgatgaacgggaccgagggcccaaacttctacgtgcctttctccaacaagacgggcgtggtggaattcatgctaaggaatggcagcatagtgacggaatttatcctcgtgggctttcagcagagctccacttccacacgagcattgctctttgccctcttcttggccctctacagcctcaccatggccatgaatggcctcatcatctttatcacctcctggacagaccccaagctcaacagccccatgtacttcttcctcggccatctgtctctcctggatgtctgcttcatcaccactaccatcccacagatgttgatccacctcgtggtcagggaccacattgtctcctttgtatgttgcatgacccagatgtactttgtcttctgtgttggtgtggccgagtgcatcctcttggctttcatggcctatgaccgttatgttgctatctgctacccacttaactatgtcccgatcataagccagaaggtctgtgtcaggcttgtgggaactgcctggttctttgggctgatcaatggcatctttctcgagtatatttcattccgagagcccttccgcagagacaaccacatagaaagcttcttctgtgaggcccccatagtgattggcctctcttgtggggaccctcagtttagtctgtgggcaatctttgccgatgccatcgtggtaattctcagccccatggtgctcactgtcacttcctatgtgcacatcctggccaccatcctcagcaaagcctcctcctcaggtcgggggaagactttctctacttgtgcctctcacctgactgtggtcatctttctctacacttcagctatgttctcttacatgaacccccacagcacacatgggcctgacaaagacaaacctttctccctcctgtacaccatcattacccccatgtgcaaccccatcatttatagtttcaggaacaaagaagttaaaaaggccataaagaggttgttcaagagaaagtgctgcaggagaaggtgagcggccgc

SEQ ID NO: 668 - DNA, 1145 bp, synthetic construct
  source 1..1145: mol_type = other DNA; note = mmLucy-FLAG-rho-OR10AG1
ggatccgccaccatgagccaccagatcctgctgctcctggccctgctgaccctaggcctggctgattacaaggacgacgacgataagatcgaattgatgaacgggaccgagggcccaaacttctacgtgcctttctccaacaagacgggcgtggtggaattcatgcaaatccctaaagatggagagcaaactaaaagagaaaaatcaaatgtgactacaataatggaatttgttcttttggggttttctgatattcccaatctccactggatgctttttagtatatttttacttatgtatttgatgatcctgatgtgcaatggcatcataatactactaataaaaattcaccccgctctccagactcccatgtatttttttcttagcaatttttcccttttggaaatctgttatgtaacaatcattatcccaagaatgctcatggacatttggactcagaaaggaaatatttctttgtttgcttgtgctacacaaatgtgtttttttcttatgcttggaggcacggagtgtctccttctgacagtgatggcctatgaccgctacgtggctatttgtaagcctttgcagtatcctctagtgatgaaccacaaagtctgcattcagctgataatagcttcctggaccatcacaattcctgtagtaattggggaaacatgccaaattttccttttgcccttttgcggaactaacacaattaatcatttcttttgtgacatcccgccaatactcaagcttgcttgtggaaacatatttgtgaatgagataacagtccatgtagtagcggtggtgtttatcacggtgccatttctgttgattgttgtctcttatggcaaaattatctccaacattttgaaattgtcatcagccagaggaaaggctaaagccttctccacctgctcatctcacctaatagttgtaatcttattctttggagcaggtactatcacttatttacagcccaaaccacatcagtttcaaaggatggggaaactgatttctcttttctacaccattctgattccaactttgaatcctattatatataccctgaggaacaaagaagttaaaaaggccataaagaggttgttcaagagaaagtgctgcaggagaaggtgagcggccgc

SEQ ID NO: 669 - DNA, 1109 bp, synthetic construct
  source 1..1109: mol_type = other DNA; note = mmLucy-FLAG-rho-OR10C1
ggatccgccaccatgagccaccagatcctgctgctcctggccctgctgaccctaggcctggctgattacaaggacgacgacgataagatcgaattgatgaacgggaccgagggcccaaacttctacgtgcctttctccaacaagacgggcgtggtggaattcatgagtgcaaacacctccatggtgactgagtttcttcttctcggcttctcccacctggccgacctccagggcttgctcttctctgtctttctcactatctacctgctgaccgtggcaggcaatttcctcattgtggtgctggtctccactgatgctgccctccagtcccctatgtacttcttcctgcgcaccctctcggccttggagattggctatacgtctgtcacggtccccctgctacttcaccacctccttactggccggcgccacatctctcgctctggatgtgctctccagatgttcttcttcctcttctttggcgccacggagtgctgcctcctggcagccatggcctatgaccgctatgcagccatctgtgaacccctccgctacccactgctgctgagccaccgggtgtgtctacagctagctgggtcggcgtgggcctgtggggtgctggtggggctgggccacacccctttcatcttctctttgcccttctgcggccccaataccatcccgcagttcttctgtgagatccagcctgtcctgcagctggtatgtggagacacctcgcttaatgaactgcagattatcctggcaacagccctcctcatcctctgcccctttggcctcatcctgggctcctacgggcgtatcctcgttaccatcttccggatcccatctgttgcgggccgccgcaaggccttctccacctgctcctcccacctgatcatggtctccctcttctatggcaccgcactctttatctatattcgccctaaggccagctacgatccggccactgaccctctggtgtccctcttctatgctgtggtcacccccatcctcaaccccatcatctacagcctgaggaacaaagaagttaaaaaggccataaagaggttgttcaagagaaagtgctgcaggagaaggtgagcggccgc

SEQ ID NO: 670 - DNA, 1109 bp, synthetic construct
  source 1..1109: mol_type = other DNA; note = mmLucy-FLAG-rho-OR10C1
ggatccgccaccatgagccaccagatcctgctgctcctggccctgctgaccctaggcctggctgattacaaggacgacgacgataagatcgaattgatgaacgggaccgagggcccaaacttctacgtgcctttctccaacaagacgggcgtggtggaattcatgagtgcaaacacctccatggtgactgagtttcttcttctcggcttctcccacctggccgacctccagggcttgctcttctctgtctttctcactatctacctgctgaccgtggcaggcaatttcctcattgtggtgctggtctccactgatgctgccctccagtcccctatgtacttcttcctgcgcaccctctcggccttggagattggctatacgtctgtcacggtccccctgctacttcaccacctccttactggccggcgccacatctctcgctctggatgtgctctccagatgttcttcttcctcttctttggcgccacggagtgctgcctcctggcagccatggcctatgaccgctatgcagccatctgtgaacccctccgctacccactgctgctgagccaccgggtgtgtctacagctagctgggtcggcgtgggcctgtggggtgctggtggggctgggccacacccctttcatcttctctttgcccttctgcggccccaataccatcccgcagttcttctgtgagatccagcctgtcctgcagctggtatgtggagacacctcgcttaatgaactgcagattatcctggcaacagccctcctcatcctctgcccctttggcctcatcctgggctcctacgggcgtatcctcgttaccatcttccggatcccatctgttgcgggccgccgcaaggccttctccacctgctcctcccacctgatcgtggtctccctcttctatggcaccgcactctttatctatattcgccctaaggccagctacgatccggccactgaccctctggtgtccctcttctatgctgtggtcacccccatcctcaaccccatcatctacagcctgaggaacaaagaagttaaaaaggccataaagaggttgttcaagagaaagtgctgcaggagaaggtgagcggccgc

SEQ ID NO: 671 - DNA, 1106 bp, synthetic construct
  source 1..1106: mol_type = other DNA; note = mmLucy-FLAG-rho-OR10D3
ggatccgccaccatgagccaccagatcctgctgctcctggccctgctgaccctaggcctggctgattacaaggacgacgacgataagatcgaattgatgaacgggaccgagggcccaaacttctacgtgcctttctccaacaagacgggcgtggtggaattcatggaggtgaagaactgctgcatggtgacagagttcatccttttgggaatcccacacacagaggggctggagatgacactttttgtcttattcttgcccttctatgcctgcactctactgggaaatgtgtctatccttgttgctgttatgtcttctgctcgccttcacacacctatgtatttcttcctgggaaacttgtctgtgtttgacatgggtttctcctcagtgacttgtcccaaaatgctgctctaccttatggggctgagccgactcatctcctacaaagactgtgtctgccagcttttcttcttccatttcctcgggagcattgagtgcttcttgtttacggtgatggcctatgaccgcttcactgccatctgttatcctctgcgatacacagtcatcatgaacccaaggatctgtgtggccctggctgtgggcacatggctgttagggtgcattcattccagtatcttgacctccctcaccttcaccttgccatactgtggtcccaatgaagtggatcacttcttctgtgacattccagcactgttgcccttggcctgtgctgacacatccttagcccagagggtgagcttcaccaacgttggcctcatatctcttgtctgctttctgctaattcttttatcctacactagaatcacaatatctatcttaagcattcgtacaactgagggccgtcgccgtgccttctccacctgcagtgctcacctcattgccatcctctgtgcctatgggcccatcatcactgtctacctgcagcccacacccaaccccatgctgggaaccgtggtacaaattctcatgaatctggtaggaccaatgctgaaccctttgatctataccttgaggaacaaagaagttaaaaaggccataaagaggttgttcaagagaaagtgctgcaggagaaggtgagcggccgc

SEQ ID NO: 672 - DNA, 1121 bp, synthetic construct
  source 1..1121: mol_type = other DNA; note = mmLucy-FLAG-rho-OR10G2
ggatccgccaccatgagccaccagatcctgctgctcctggccctgctgaccctaggcctggctgattacaaggacgacgacgataagatcgaattgatgaacgggaccgagggcccaaacttctacgtgcctttctccaacaagacgggcgtggtggaattcatgggaaagaccaaaaacacatcgctggatgccgtggtgacagatttcattcttctgggtttgtctcaccccccaaatctaagaagcctcctcttcctggtcttcttcatcatttacatcctcactcagctggggaacctgctcattctgctcaccatgtgggctgacccgaagctctgtgctcgccccatgtacattcttctgggagtgctctcattcctggacatgtggctctcctcagtcaccgttcctcggcttattttggattttactccttccatcaaggctatcccgtttggtggctgtgtggctcaactgtatttctttcacttcctgggcagcacccagtgcttcctctacaccttgatggcctatgacaggtacctagcaatatgtcagcccctgcactacccagtgctcatgaatgggaggttatgcacagtccttgtggctggagcttgggtcgccggctccatgcatgggtctatccaggccaccttgaccttccgcctgccctactgtgggcccaatcaggtggattactttatctgtgacatccgcgcagtattgagactggcctgtgctgacacaactgtcaatgagcttgtgacctttgtggacgtcagggtagtggccgccagttgcttcatgttaattctgctctcctatgccaacatagtccatgccatcctgaagatacgcaccgctgatgggaggcgccgggccttctccacctgtggctcccacctaatcgtggtcacagtctactatgtcccctgtattttcatctaccttagggctggctccaaagaccccctggatggggcagcggctgtgttttacactgttgtcactccattactgaaccccctcatctatacactgaggaacaaagaagttaaaaaggccataaagaggttgttcaagagaaagtgctgcaggagaaggtgagcggccgc

SEQ ID NO: 673 - DNA, 1109 bp, synthetic construct
  source 1..1109: mol_type = other DNA; note = mmLucy-FLAG-rho-OR10G3(S73G)
ggatccgccaccatgagccaccagatcctgctgctcctggccctgctgaccctaggcctggctgattacaaggacgacgacgataagatcgaattgatgaacgggaccgagggcccaaacttctacgtgcctttctccaacaagacgggcgtggtggaattcatggaaagaatcaacagcacactgttgactgcgtttatcctgacaggaattccgtatccactcaggctaaggacactcttttttgtgttcttttttctaatctacatcctgactcagctgggaaacctgcttattttaatcactgtctgggcagacccaaggctccatgcccgccccatgtacatctttcttggtgttctctcagtcattgatatgggcatctcctccatcattgtccctcgcctcatgatgaacttcactttaggtgtcaaacccatcccatttggtggctgtgttgctcaactctatttctatcacttcctgggcagcacccagtgcttcctctacaccctaatggcctatgacaggtacctggcaatatgtcagcccctgcgctaccctgtgctcatgactgctaagctgagcgccttgcttgtggctggagcctggatggcaggatccatccatggggctctccaggccatcctaaccttccgcctgccctactgtgggcccaatcaggtggattacttcttctgtgacatccctgcagtgttgagactggcctgtgctgacacaacagtcaacgagctggtgacgtttgtagacattggggtggtggttgccagttgcttctccctgatcctcctctcctacatacagatcattcaggccatcctgagaatccacacagctgatgggcggcgccgggctttttcaacttgtggagcccatgtaaccgtggtcaccgtgtactatgtgccctgtgccttcatctacctgaggcctgaaaccaacagccccctggatggggcagctgccctagtccccacggccatcactcctttcctcaacccccttatctacactctgaggaacaaagaagttaaaaaggccataaagaggttgttcaagagaaagtgctgcaggagaaggtgagcggccgc

SEQ ID NO: 674 - DNA, 1103 bp, synthetic construct
  source 1..1103: mol_type = other DNA; note = mmLucy-FLAG-rho-OR10G4
ggatccgccaccatgagccaccagatcctgctgctcctggccctgctgaccctaggcctggctgattacaaggacgacgacgataagatcgaattgatgaacgggaccgagggcccaaacttctacgtgcctttctccaacaagacgggcgtggtggaattcatgtccaacgccagcctcgtgacagcattcatcctcacaggccttccccatgccccagggctggacgccctcctctttggaatcttcctggtggtttacgtgctcactgtgctggggaacctcctcatcctgctggtgatcagggtggattctcacctccacacccccatgtactacttcctcaccaacctgtccttcattgacatgtggttctccactgtcacggtgcccaaaatgctgatgaccttggtgtccccaagcggcagggctatctccttccacagctgcgtggctcagctctattttttccacttcctggggagcaccgagtgtttcctctacacagtcatgtcctatgatcgctacttggccatcagttacccgctcaggtacaccagcatgatgagtgggagcaggtgtgccctcctggccaccggcacttggctcagtggctctctgcactctgctgtccagaccatattgactttccatttgccctactgtggacccaaccagatccagcactacttctgtgacgcaccgcccatcctgaaactggcctgtgcagacacctcagccaacgtgatggtcatctttgtggacattgggatagtggcctcaggctgctttgtcctgatagtgctgtcctatgtgtccatcgtctgttccatcctgcggatccgcacctcagatgggaggcgcagagcctttcagacctgtgcctcccactgtattgtggtcctttgcttctttgttccctgtgttgtcatttatctgaggccaggctccatggatgccatggatggagttgtggccattttctacactgtgctgacgccccttctcaaccctgttgtgtacaccctgaggaacaaagaagttaaaaaggccataaagaggttgttcaagagaaagtgctgcaggagaaggtgagcggccgc

SEQ ID NO: 675 - DNA, 1169 bp, synthetic construct
  source 1..1169: mol_type = other DNA; note = mmLucy-FLAG-rho-OR10G6
ggatccgccaccatgagccaccagatcctgctgctcctggccctgctgaccctaggcctggctgattacaaggacgacgacgataagatcgaattgatgaacgggaccgagggcccaaacttctacgtgcctttctccaacaagacgggcgtggtggaattcatgttagagggtgttgagcatctccttctgctacttcttttgacagatgtgaacagcaaggaactgcaaagtggaaaccagacttctgtgtctcacttcattttggtgggcctgcaccacccaccacagctgggagcgccactcttcttagctttccttgtcatctatctcctcactgtttctggaaatgggctcatcatcctcactgtcttagtggacatccggctccatcgtcccatgtgcttgttcctgtgtcacctctccttcttggacatgaccatttcttgtgctattgtccccaagatgctggctggctttctcttgggtagtaggattatctcctttgggggctgtgtaatccaactattttctttccatttcctgggctgtactgagtgcttcctttacacactcatggcttatgaccgtttccttgccatttgtaagcccttacactatgctaccatcatgacccacagagtctgtaactccctggctttaggcacctggctgggagggactatccattcacttttccaaacaagttttgtattccggctgcccttctgtggccccaatcgggtcgactacatcttctgtgacattcctgccatgctgcgtctagcctgcgccgatacggccatcaacgagctggtcacctttgcagacattggcttcctggccctcacctgcttcatgctcatcctcacttcctatggctatattgtagctgccatcctgcgaattccgtcagcagatgggcgccgcaatgccttctccacttgtgctgcccacctcactgttgtcattgtttactatgtgccctgcaccttcatttacctgcggccttgttcacaggagcccctggatggggtggtagctgtcttttacactgtcatcactcccttgcttaactccatcatctacacactgaggaacaaagaagttaaaaaggccataaagaggttgttcaagagaaagtgctgcaggagaaggtgagcggccgc

SEQ ID NO: 676 - DNA, 1103 bp, synthetic construct
  source 1..1103: mol_type = other DNA; note = mmLucy-FLAG-rho-OR10G7(T5S)
ggatccgccaccatgagccaccagatcctgctgctcctggccctgctgaccctaggcctggctgattacaaggacgacgacgataagatcgaattgatgaacgggaccgagggcccaaacttctacgtgcctttctccaacaagacgggcgtggtggaattcatgtccaacgcctccctactgacagcgttcatcctcacgggccttccccatgccccagggctggacgcccccctctttggaatcttcctggtggtttacgtgctcactgtgctggggaacctcctcatcctgctggtgatcagggtggattctcacctccacacccccatgtactacttcctcaccaacctgtccttcattgacatgtggttctccactgtcacggtgcccaaaatgctgatgaccttggtgtccccaagcggcaggactatctccttccacagctgcgtggctcagctctattttttccacttcctggggagcaccgagtgtttcctctacacagtcatgtcctatgatcgctacctggccatcagttacccgctcaggtacaccaacatgatgactgggcgctcgtgtgccctcctggccaccggcacttggctcagtggctctctgcactctgctgtccagaccatattgactttccatttgccctactgtggacccaaccagatccagcactacttctgtgacgcaccgcccatcctgaaactggcctgtgcagacacctcagccaacgagatggtcatctttgtgaatattgggctagtggcctcgggctgctttgtcctgatagtgctgtcctatgtgtccatcgtctgttccatcctgcggatccgcacctcagaggggaggcacagagcctttcagacctgtgcctcccactgtatcgtggtcctttgcttctttggccctggtcttttcatttacctgaggccaggctccagggacgccttgcatggggttgtggccgttttctacaccacgctgactcctcttttcaaccctgttgtgtacaccctgaggaacaaagaagttaaaaaggccataaagaggttgttcaagagaaagtgctgcaggagaaggtgagcggccgc

SEQ ID NO: 677 - DNA, 1103 bp, synthetic construct
  source 1..1103: mol_type = other DNA; note = mmLucy-FLAG-rho-OR10G8
ggatccgccaccatgagccaccagatcctgctgctcctggccctgctgaccctaggcctggctgattacaaggacgacgacgataagatcgaattgatgaacgggaccgagggcccaaacttctacgtgcctttctccaacaagacgggcgtggtggaattcatgtccaacgccagcctactgacagcgttcatcctcatgggccttccccatgccccagcgctggacgcccccctctttggagtcttcctggtggtttacgtgctcactgtgctggggaacctcctcatcctgctggtgatcagggtggattctcacctccacaccaccatgtactacttcctcaccaacctgtcgttcattgacatgtggttctccactgtcacggtgcccaaattgctgatgactttggtgttcccaagtggcagggctatctccttccacagctgcatggctcagctctatttctttcacttcctagggggcaccgagtgtttcctctacagggtcatgtcctgtgatcgctacctggccatcagttacccgctcaggtacaccagcatgatgactgggcgctcgtgtactcttctggccaccagcacttggctcagtggctctctgcactctgctgtccaggccatattgactttccatttgccctactgtggacccaactggatccagcactatttgtgtgatgcaccgcccatcctgaaactggcctgtgcagacacctcagccatagagactgtcatttttgtgactgttggaatagtggcctcgggctgctttgtcctgatagtgctgtcctatgtgtccatcgtctgttccatcctgcggatccgcacctcagaggggaagcacagagcctttcagacctgtgcctcccactgtatcgtggtcctttgcttctttggccctggtcttttcatttacctgaggccaggctccaggaaagctgtggatggagttgtggccgttttctacactgtgctgacgccccttctcaaccctgttgtgtacaccctgaggaacaaagaagttaaaaaggccataaagaggttgttcaagagaaagtgctgcaggagaaggtgagcggccgc

SEQ ID NO: 678 - DNA, 1103 bp, synthetic construct
  source 1..1103: mol_type = other DNA; note = mmLucy-FLAG-rho-OR10G9
ggatccgccaccatgagccaccagatcctgctgctcctggccctgctgaccctaggcctggctgattacaaggacgacgacgataagatcgaattgatgaacgggaccgagggcccaaacttctacgtgcctttctccaacaagacgggcgtggtggaattcatgtccaagaccagcctcgtgacagcgttcatcctcacgggccttccccatgccccagggctggacgccccactctttggaatcttcctggtggtttacgtgctcactgtgctggggaacctcctcatcctgctggtgatcagggtggattctcacctccacacccccatgtactacttcctcaccaacctgtccttcattgacatgtggttctccactgtcacggtgcccaaaatgctgatgaccttggtgtccccaagcggcagggctatctccttccacagctgcgtggctcagctctattttttccacttcctggggagcaccgagtgtttcctctacacagtcatgtcctatgatcgctacttggccatcagttacccgctcaggtacaccagcatgatgagtgggagcagatgtgccctcctggccaccagcacttggctcagtggctctctgcactctgctgtccagaccatattgactttccatttgccctactgtggacccaaccagatccagcactatttgtgtgatgcaccgcccatcctgaaactggcctgtgcagacacctcagccaacgagatggtcatctttgtggacattgggctagtggcctcgggctgctttctcctgatagtgctgtcttatgtgtccatcgtctgttccatcctgcggatccacacctcagaggggaggcacagagcctttcagacctgtgcctcccactgcatcgtggtcctttgcttttttgttccctgtgttttcatttacctgagaccaggctccagggacgtcgtggatggagttgtggccattttctacactgtgctgacaccccttctcaaccctgttgtgtacaccctgaggaacaaagaagttaaaaaggccataaagaggttgttcaagagaaagtgctgcaggagaaggtgagcggccgc

SEQ ID NO: 679 - DNA, 1115 bp, synthetic construct
  source 1..1115: mol_type = other DNA; note = mmLucy-FLAG-rho-OR10H1
ggatccgccaccatgagccaccagatcctgctgctcctggccctgctgaccctaggcctggctgattacaaggacgacgacgataagatcgaattgatgaacgggaccgagggcccaaacttctacgtgcctttctccaacaagacgggcgtggtggaattcatgcagagagccaatcactccacagtgacccaattcatcctcgtcggcttctctgtcttcccccacctccagctgatgctcttcctgctgttcctgctgatgtacctgttcacgctgctgggcaacctgctcatcatggccaccgtctggagcgagcgcagcctccacacgcccatgtacctcttcctgtgcgccctctccgtctccgagatcctctacaccgtggccatcatcccgcgcatgctggccgacctgctgtccacccagcgctccatcgccttcctggcctgtgccagtcagatgttcttctccttcagcttcggcttcacccactccttcctgctcaccgtcatgggctacgaccgctacgtggccatctgccaccccctgcgctacaacgtgctcatgagcccgcggggctgcgcctgcctggtgggctgctcctgggctggtggcttggtcatggggatggtggtgacctcggccattttccacctcgccttctgtggacacaaggagatccaccattttgcttgccatgtgccacctctgttgaagttggcctgtggagacgatgtgctggtggtggccaaaggcgtgggcttggtgtgtatcacggccctgctgggctgttttctcctcatcctcctctcctatgccttcatcgtggccgccatcttgaagatcccttctgctgaaggtcggaacaaggccttctccacctgtgcctctcacctcactgtggtggtcgtgcactatggctttgcctccgtcatttacctgaagcccaaaagtccccagtctctggaaggagacaccttgatgggcatcacctacacggtcctcacacccttcctcagccccatcatcttcagcctcaggaacaaagaagttaaaaaggccataaagaggttgttcaagagaaagtgctgcaggagaaggtgagcggccgc

SEQ ID NO: 680 - DNA, 1115 bp, synthetic construct
  source 1..1115: mol_type = other DNA; note = mmLucy-FLAG-rho-OR10H2
ggatccgccaccatgagccaccagatcctgctgctcctggccctgctgaccctaggcctggctgattacaaggacgacgacgataagatcgaattgatgaacgggaccgagggcccaaacttctacgtgcctttctccaacaagacgggcgtggtggaattcatgctggggctaaaccacacctccatgtctgaattcatcctcgtcggcttctctgccttcccccacctccaactgatgctcttcctgctgttcctgctgatgtacctgttcacgctgctgggcaacctgctcatcatggccaccgtctggagcgagcgcagcctccacacgcccatgtacctcttcctgtgcgtcctctcagtctccgagatcctctacaccgtggccatcatcccgcgcatgctggccgacctgctgtccacccagcgctccatcgccttcctggcctgtgccagtcagatgttcttctccttcagcttcggcttcacccactccttcctgctcaccgtcatgggctacgaccgctacgtggccatctgccaccccctgcgctacaacgtgctcatgagcccacggggctgcgcctgcctggtgggctgctcctgggctggtggctcggtcatggggatggtggtgacctcggccattttccaactgactttctgtggatcccatgagatccagcattttttatgtcatgtgccacctctgttgaagttggcctgtggaaataatgtaccagctgtggccctgggcgtgggcttggtatgtatcatggcactgctgggctgttttctcctcatcctcctctcctatgccttcatcgtggccgacatcttgaagatcccttctgctgaaggtcggaacaaggccttctccacctgtgcctctcaccttattgtggtcattgtgcactatggctttgcctctgtcatctacctcaagcccaaaggtccccactctcaggagggtgacaccctgatggccaccacctacgcagtcctcacgcccttcctcagccccatcatcttcagcctcaggaacaaagaagttaaaaaggccataaagaggttgttcaagagaaagtgctgcaggagaaggtgagcggccgc

SEQ ID NO: 681 - DNA, 1118 bp, synthetic construct
  source 1..1118: mol_type = other DNA; note = mmLucy-FLAG-rho-OR10H3(R7S,R54H)
ggatccgccaccatgagccaccagatcctgctgctcctggccctgctgaccctaggcctggctgattacaaggacgacgacgataagatcgaattgatgaacgggaccgagggcccaaacttctacgtgcctttctccaacaagacgggcgtggtggaattcatgcctggtcagaactacagcaccatatctgaatttatcctctctggcttctcagccttcccccagcagctcctgcctgtcttgttcctgctgtacctcctgatgttcctgttcacattgcttggcaaccttcttatcatggccacagtttggattgaacacagactccacacacccatgtacctcttcttgtgtgccctctccatctctgagattctgttcactgttgccatcacccctcgcatgctggctgatctgctcttcacccatcgttccatcacctttgtggcttgtgccattcagatgttcttctccttcatgtttggcttcactcactccttccttctcatggtcatgggctatgatcactacgtgaccatctgccacccactgcattacaacatgctaatgagtccccgtggctgtgcccatcttgtggcctggacctgggctggtggctcggtcatggggatgatggtgacaatgatggtttttcacctcactttctgtgggtctaatgtgatccaccattttctctgtcatgtgctttccctcttgaagttggcctgtgggagcaagacatcatctgtcatcatgggtgtgatgctggtgtgtgtcacagccctgataggctgtttgttcctcatcatcctctcctttgtcttcattgtggctgccatcttgaggattccttctgctgagggccggcacaagactttctccacttgtgtatcccacctcactgtggtggtcatgcactatagttttgcctcccttatctacctcaaacccaagggcctccattctatgtacagtgatgccttgatggccaccacctatactgtcttcacccccttcctcagcccaatcattttcagtctaaggaacaaagaagttaaaaaggccataaagaggttgttcaagagaaagtgctgcaggagaaggtgagcggccgc

SEQ ID NO: 682 - DNA, 1118 bp, synthetic construct
  source 1..1118: mol_type = other DNA; note = mmLucy-FLAG-rho-OR10H3(R7S,V224M)
ggatccgccaccatgagccaccagatcctgctgctcctggccctgctgaccctaggcctggctgattacaaggacgacgacgataagatcgaattgatgaacgggaccgagggcccaaacttctacgtgcctttctccaacaagacgggcgtggtggaattcatgcctggtcagaactacagcaccatatctgaatttatcctctctggcttctcagccttcccccagcagctcctgcctgtcttgttcctgctgtacctcctgatgttcctgttcacattgcttggcaaccttcttatcatggccacagtttggattgaacgcagactccacacacccatgtacctcttcttgtgtgccctctccatctctgagattctgttcactgttgccatcacccctcgcatgctggctgatctgctcttcacccatcgttccatcacctttgtggcttgtgccattcagatgttcttctccttcatgtttggcttcactcactccttccttctcatggtcatgggctatgatcactacgtgaccatctgccacccactgcattacaacatgctaatgagtccccgtggctgtgcccatcttgtggcctggacctgggctggtggctcggtcatggggatgatggtgacaatgatggtttttcacctcactttctgtgggtctaatgtgatccaccattttctctgtcatgtgctttccctcttgaagttggcctgtgggagcaagacatcatctgtcatcatgggtgtgatgctggtgtgtgtcacagccctgataggctgtttgttcctcatcatcctctcctttgtcttcattatggctgccatcttgaggattccttctgctgagggccggcacaagactttctccacttgtgtatcccacctcactgtggtggtcatgcactatagttttgcctcccttatctacctcaaacccaagggcctccattctatgtacagtgatgccttgatggccaccacctatactgtcttcacccccttcctcagcccaatcattttcagtctaaggaacaaagaagttaaaaaggccataaagaggttgttcaagagaaagtgctgcaggagaaggtgagcggccgc

SEQ ID NO: 683 - DNA, 1118 bp, synthetic construct
  source 1..1118: mol_type = other DNA; note = mmLucy-FLAG-rho-OR10H4
ggatccgccaccatgagccaccagatcctgctgctcctggccctgctgaccctaggcctggctgattacaaggacgacgacgataagatcgaattgatgaacgggaccgagggcccaaacttctacgtgcctttctccaacaagacgggcgtggtggaattcatgcctagtcagaactatagcatcatatctgaatttaacctctttggcttctcagccttcccccagcacctcctgcccatcttgttcctgctgtacctcctgatgttcctgttcacattgctgggcaaccttctcatcatggccacaatctggattgaacacagactccacacacccatgtacctcttcttgtgcaccctctccgtctctgagattctgttcactgttgccatcacccctcgcatgctggctgatctgctttccacccatcattccatcacctttgtggcttgtgccaaccagatgttcttctccttcatgtttggcttcactcactccttccttctcctggtcatgggctatgatcgctatgtggccatctgccacccactgcgttacaatgtgctcatgagcccccgtgactgtgcccatcttgtggcctgtacctgggctggtggctcagtcatggggatgatggtgacaacgatagttttccacctcactttctgtgggtctaatgtgatccaccattttttctgtcatgtgctttccctcttgaagttggcctgtgaaaacaagacatcatctgtcatcatgggtgtgatgctggtgtgtgtcacagccctgataggctgtttattcctcatcatcctctcctatgtcttcattgtggctgccatcttgaggattccctctgccgaaggccggcacaagacattttctacgtgtgtatcccacctcactgtggtggtcacgcactatagttttgcctcctttatctacctcaagcccaagggcctccattctatgtacagtgacgccttgatggccaccacctatactgtcttcacccccttccttagcccaatcattttcagcctaaggaacaaagaagttaaaaaggccataaagaggttgttcaagagaaagtgctgcaggagaaggtgagcggccgc

SEQ ID NO: 684 - DNA, 1115 bp, synthetic construct
  source 1..1115: mol_type = other DNA; note = mmLucy-FLAG-rho-OR10H5
ggatccgccaccatgagccaccagatcctgctgctcctggccctgctgaccctaggcctggctgattacaaggacgacgacgataagatcgaattgatgaacgggaccgagggcccaaacttctacgtgcctttctccaacaagacgggcgtggtggaattcatgcaggggctaaaccacacctccgtgtctgaattcatcctcgttggcttctctgccttcccccacctccagctgatgctcttcctgctgttcctgctgatgtacctgttcacgctgctgggcaacctgctcatcatggccactgtctggagcgagcgcagcctccacatgcccatgtacctcttcctgtgtgccctctccatcaccgagatcctctacaccgtggccatcatcccgcgcatgctggccgacctgctgtccacccagcgctccatcgccttcctggcctgtgccagtcagatgttcttctccttcagcttcggcttcacccactccttcctgctcactgtcatgggctacgaccgctacgtggccatctgccaccccctgcgttacaacgtgctcatgagcctgcggggctgcacctgccgggtgggctgctcctgggctggtggcttggtcatggggatggtggtgacctcggccattttccacctcgccttctgtggacacaaggagatccaccatttcttctgccacgtgccacctctgttgaagttggcctgtggagatgatgtgctggtggtggccaaaggcgtgggcttggtgtgtatcacggccctgctgggctgttttctcctcatcctcctctcctatgccttcatcgtggccgccatcttgaagatcccttctgctgaaggtcggaacaaggccttctccacctgtgcctctcacctcactgtggtggtcgtgcactatggctttgcctccgtcatttacctgaagcccaaaggtccccagtctccggaaggagacaccttgatgggcatcacctacacggtcctcacacccttcctcagccccatcatcttcagcctcaggaacaaagaagttaaaaaggccataaagaggttgttcaagagaaagtgctgcaggagaaggtgagcggccgc

SEQ ID NO: 685 - DNA, 1109 bp, synthetic construct
  source 1..1109: mol_type = other DNA; note = mmLucy-FLAG-rho-OR10J1(M51I,I92M)
ggatccgccaccatgagccaccagatcctgctgctcctggccctgctgaccctaggcctggctgattacaaggacgacgacgataagatcgaattgatgaacgggaccgagggcccaaacttctacgtgcctttctccaacaagacgggcgtggtggaattcatgaaaagagagaactttactctcatcactgactttgttttccaaggtttctctagcttccatgagcagcagatcaccctttttggcgtgttccttgcactatacatcttaaccttagcaggcaatatcatcattgtgaccatcatccgaattgatcttcatcttcacacacccatgtacttcttcctgagcatgctgtccacttcagagactgtatatacattggtcattctcccaagaatgctctccagcctcgtaggtatgagccagcccatgtcattggcagggtgtgccacacagatgttcttttttgtaacctttggcatcactaactgcttcctgctcacagcaatgggatatgaccgctatgtggccatctgcaaccccctgagatacatggttattatgaacaagaggctgcgtatccaacttgtcctgggggcctgcagcattgggctgattgtagcaataacgcaagtgacatctgtattcaggttacccttctgtgctagaaaggtgccccacttcttctgtgacatccgccctgtgatgaagctctcctgcattgacaccactgtcaatgaaatcctgactttgattatcagtgtgctggtgcttgttgtacctatgggtctggttttcatttcttatgttctcattatctctacaatcctcaagattgcttcagttgagggccggaagaaggcttttgccacctgtgcatcccacctcactgtggtcattgtccactacagctgtgcctccattgcctacctcaagcccaagtcagagaacaccagagaacatgaccagctgatctcggtgacctacactgtcatcactcccctactgaaccctgtggtatacaccctgaggaacaaagaagttaaaaaggccataaagaggttgttcaagagaaagtgctgcaggagaaggtgagcggccgc

SEQ ID NO: 686 - DNA, 1109 bp, synthetic construct
  source 1..1109: mol_type = other DNA; note = mmLucy-FLAG-rho-OR10J5
ggatccgccaccatgagccaccagatcctgctgctcctggccctgctgaccctaggcctggctgattacaaggacgacgacgataagatcgaattgatgaacgggaccgagggcccaaacttctacgtgcctttctccaacaagacgggcgtggtggaattcatgaagagaaagaacttcacagaagtgtcagaattcattttcttgggattttctagctttggaaagcatcagataaccctctttgtggttttcctaactgtctacattttaactctggttgctaacatcatcattgtgactatcatctgcattgaccatcatctccacactcccatgtatttcttcctaagcatgctggctagttcagagacggtgtacacactggtcattgtgccacgaatgcttttgagcctcatttttcataaccaacctatctccttggcaggctgtgctacacaaatgttcttttttgttatcttggccactaataattgcttcctgcttactgcaatggggtatgaccgctatgtggccatctgcagacccctgagatacactgtcatcatgagcaagggactatgtgcccagctggtgtgtgggtcctttggcattggtctgactatggcagttctccatgtgacagccatgttcaatttgccgttctgtggcacagtggtagaccacttcttttgtgacatttacccagtcatgaaactttcttgcattgataccactatcaatgagataataaattatggtgtaagttcatttgtgatttttgtgcccataggcctgatatttatctcctatgtccttgtcatctcttccatccttcaaattgcctcagctgagggccggaagaagacctttgccacctgtgtctcccacctcactgtggttattgtccactgtggctgtgcctccattgcctacctcaagccgaagtcagaaagttcaatagaaaaagaccttgttctctcagtgacgtacaccatcatcactcccttgctgaaccctgttgtttacagtctgaggaacaaagaagttaaaaaggccataaagaggttgttcaagagaaagtgctgcaggagaaggtgagcggccgc

SEQ ID NO: 687 - DNA, 1112 bp, synthetic construct
  source 1..1112: mol_type = other DNA; note = mmLucy-FLAG-rho-OR10K1
ggatccgccaccatgagccaccagatcctgctgctcctggccctgctgaccctaggcctggctgattacaaggacgacgacgataagatcgaattgatgaacgggaccgagggcccaaacttctacgtgcctttctccaacaagacgggcgtggtggaattcatggagcaagtcaataagactgtggtgagagagttcgtcgtcctcggcttctcatccctggccaggctgcagcagctgctctttgttatcttcctgctcctctacctgttcactctgggcaccaatgcaatcatcatttccaccattgtgctggacagagcccttcatactcccatgtacttcttccttgccatcctttcttgctctgagatttgctatacctttgtcattgtacccaagatgctggttgacctgctgtcccagaagaagaccatttctttcctgggctgtgccatccaaatgttttccttcctcttctttggctcctctcactccttcctgctggcagccatgggctatgatcgctatatggccatctgtaacccactgcgctactcagtgctcatgggacatggggtgtgtatgggactaatggctgctgcctgtgcctgtggcttcactgtctccctggtcaccacctccctagtatttcatctgcccttccactcctccaaccagctccatcacttcttctgtgacatctcccctgtccttaaactggcatctcagcactccggcttcagtcagctggtcatattcatgcttggtgtatttgccttggtcattcctctgctacttatcctagtctcctacatccgcatcatctctgccattctaaaaatcccttcctccgttggaagatacaagaccttctccacctgtgcctcccatctcattgtggtaactgttcactacagttgtgcctctttcatctacttaaggcccaagactaattacacttcaagccaagacaccctaatatctgtgtcatacaccatccttaccccattgttcaatccaatgatttatagtctgaggaacaaagaagttaaaaaggccataaagaggttgttcaagagaaagtgctgcaggagaaggtgagcggccgc

SEQ ID NO: 688 - DNA, 1112 bp, synthetic construct
  source 1..1112: mol_type = other DNA; note = mmLucy-FLAG-rho-OR10K2
ggatccgccaccatgagccaccagatcctgctgctcctggccctgctgaccctaggcctggctgattacaaggacgacgacgataagatcgaattgatgaacgggaccgagggcccaaacttctacgtgcctttctccaacaagacgggcgtggtggaattcatggagcgggtcaatgagactgtggtgagagaggtcatcttcctcggcttctcatccctggccaggctgcagcagctgctctttgttatcttcctgctcctctacctgttcactctgggcaccaatgcaatcatcatttccaccattgtcctggacagggcccttcatatccccatgtacttcttccttgccatcctctcttgctctgagatttgctacaccttcatcattgtacccaagatgctggttgacctgctgtcccagaagaagaccatttctttcctgggctgtgccatccaaatgttttccttcctcttccttggctgctctcactcctttctgctggcagtcatgggttatgatcgttacatagccatctgtaacccactgcgctactcagtgctaatgggacatggggtgtgtatgggactagtggctgctgcctgtgcctgtggcttcactgttgcacagatcatcacatccttggtatttcacctgcctttttattcctccaatcaactacatcacttcttctgtgacattgctcctgtcctcaagctggcatctcaccataaccactttagtcagattgtcatcttcatgctctgtacattggtcctggctatccccttattgttgatcttggtgtcctatgttcacatcctctctgccatacttcagtttccttccacactgggtaggtgcaaagctttttctacctgtgtatctcacctcattattgtcactgtccactatggctgtgcctcctttatctacttaaggcctcagtccaactactcctcaagccaggatgctctaatatcagtatcctacactattataactccattgttcaacccaatgatttatagcttgaggaacaaagaagttaaaaaggccataaagaggttgttcaagagaaagtgctgcaggagaaggtgagcggccgc

SEQ ID NO: 689 - DNA, 1115 bp, synthetic construct
  source 1..1115: mol_type = other DNA; note = mmLucy-FLAG-rho-OR10P1
ggatccgccaccatgagccaccagatcctgctgctcctggccctgctgaccctaggcctggctgattacaaggacgacgacgataagatcgaattgatgaacgggaccgagggcccaaacttctacgtgcctttctccaacaagacgggcgtggtggaattcatggctggggaaaaccatactacactgcctgaattcctccttctgggattctctgacctcaaggccctgcagggccccctgttctgggtggtgcttctggtctacctggtcaccttgctgggtaactccctgatcatcctcctcacacaggtcagccctgccctgcactcccccatgtacttcttcctgcgccaactctcagtggtggagctcttctacaccactgacatcgtgcccaggaccctggccaatctgggctccccgcatccccaggccatctctttccagggctgtgcagcccagatgtacgtcttcattgtcctgggcatctcggagtgctgcctgctcacggccatggcctatgaccgatatgttgccatctgccagcccctacgctattccaccctcttgagcccacgggcctgcatggccatggtgggtacctcctggctcacaggcatcatcacggccaccacccatgcctccctcatcttctctctaccttttcgcagccacccgatcatcccgcactttctctgtgacatcctgccagtactgaggctggcaagtgctgggaagcacaggagcgagatctccgtgatgacagccaccatagtcttcattatgatccccttctctctgattgtcacctcttacatccgcatcctgggtgccatcctagcaatggcctccacccagagccgccgcaaggtcttctccacctgctcctcccatctgctcgtggtctctctcttctttggaacagccagcatcacctacatccggccgcaggcaggctcctctgttaccacagaccgcgtcctcagtctcttctacacagtcatcacacccatgctcaaccccatcatctacacccttaggaacaaagaagttaaaaaggccataaagaggttgttcaagagaaagtgctgcaggagaaggtgagcggccgc

SEQ ID NO: 690 - DNA, 1115 bp, synthetic construct
  source 1..1115: mol_type = other DNA; note = mmLucy-FLAG-rho-OR10P1(P88L,V200M)
ggatccgccaccatgagccaccagatcctgctgctcctggccctgctgaccctaggcctggctgattacaaggacgacgacgataagatcgaattgatgaacgggaccgagggcccaaacttctacgtgcctttctccaacaagacgggcgtggtggaattcatggctggggaaaaccatactacactgcctgaattcctccttctgggattctctgacctcaaggccctgcagggccccctgttctgggtggtgcttctggtctacctggtcaccttgctgggtaactccctgatcatcctcctcacacaggtcagccctgccctgcactcccccatgtacttcttcctgcgccaactctcagtggtggagctcttctacaccactgacatcgtgcccaggaccctggccaatctgggctccctgcatccccaggccatctctttccagggctgtgcagcccagatgtacgtcttcattgtcctgggcatctcggagtgctgcctgctcacggccatggcctatgaccgatatgttgccatctgccagcccctacgctattccaccctcttgagcccacgggcctgcatggccatggtgggtacctcctggctcacaggcatcatcacggccaccacccatgcctccctcatcttctctctaccttttcgcagccacccgatcatcccgcactttctctgtgacatcctgccagtactgaggctggcaagtgctgggaagcacaggagcgagatctccatgatgacagccaccatagtcttcattatgatccccttctctctgattgtcacctcttacatccgcatcctgggtgccatcctagcaatggcctccacccagagccgccgcaaggtcttctccacctgctcctcccatctgctcgtggtctctctcttctttggaacagccagcatcacctacatccggccgcaggcaggctcctctgttaccacagaccgcgtcctcagtctcttctacacagtcatcacacccatgctcaaccccatcatctacacccttaggaacaaagaagttaaaaaggccataaagaggttgttcaagagaaagtgctgcaggagaaggtgagcggccgc

SEQ ID NO: 691 - DNA, 1127 bp, synthetic construct
  source 1..1127: mol_type = other DNA; note = mmLucy-FLAG-rho-OR10Q1
ggatccgccaccatgagccaccagatcctgctgctcctggccctgctgaccctaggcctggctgattacaaggacgacgacgataagatcgaattgatgaacgggaccgagggcccaaacttctacgtgcctttctccaacaagacgggcgtggtggaattcatgcctgtggggaaacttgtcttcaaccagtctgagcccactgagtttgtgttccgtgcgttcaccacagccactgaattccaggttcttctcttccttctcttcctcctcctctacttgatgatcctctgtggcaacacagccatcatctgggtggtgtgcacacacagcaccctccgcaccccgatgtatttcttcctgtccaacctgtctttcctggaactctgctacaccaccgtggtagtacccttgatgctttccaacattttgggggcccagaagcccatttcgttggctggatgtggggcccaaatgttcttctttgtcaccctcggcagcacggactgtttcctcttggcgatcatggcctatgaccgctatgtggctatctgccacccgctgcactacaccctcatcatgacccgcgagctgtgcacgcagatgctgggtggggccctgggcctggccctcttcccctccctgcagctcaccgccttaatcttcaccctgcccttttgcggccaccaccaggaaatcaaccacttcctctgcgatgtgcctcccgtcctgcgcctggcctgcgctgacatccgcgtgcaccaggctgtcctctatgtcgtgagcatcctcgtgctgaccatccccttcctgctcatctgcgtctcctacgtgttcatcacctgtgccatcctgagcatccgttctgccgagggccgccgccgggccttctccacctgctccttccacctcaccgtggtcctgctgcagtatggctgctgcagcctcgtgtacctgcgtcctcggtccagcacctcagaggatgaggacagccaaatcgcgttggtctacacctttgtcacccccttactcaaccctttgctttacagccttaggaacaaagaagttaaaaaggccataaagaggttgttcaagagaaagtgctgcaggagaaggtgagcggccgc

SEQ ID NO: 692 - DNA, 1139 bp, synthetic construct
  source 1..1139: mol_type = other DNA; note = mmLucy-FLAG-rho-OR10R2
ggatccgccaccatgagccaccagatcctgctgctcctggccctgctgaccctaggcctggctgattacaaggacgacgacgataagatcgaattgatgaacgggaccgagggcccaaacttctacgtgcctttctccaacaagacgggcgtggtggaattcatgttttacttctttccccctttgcagatcttggcagaaaacctcaccatggtcaccgaattcctgttgctgggtttttccagccttggtgaaattcagctggccctctttgtagtttttctttttctgtatctagtcattcttagtggcaatgtcaccattatcagtgtcatccacctggataaaagcctccacacaccaatgtacttcttccttggcattctctcaacatctgagaccttctacacctttgtcattctacccaagatgctcatcaatctactttctgtggccaggacaatctccttcaactgttgtgctcttcaaatgttcttcttccttggttttgccattaccaactgcctgctattgggtgtgatgggttatgatcgctatgctgccatttgtcaccctctgcattaccccactcttatgagctggcaggtgtgtggaaaactggcagctgcctgtgcaattggtggcttcttggcctctcttacagtagtaaatttagttttcagcctccctttttgtagcgccaacaaagtcaatcattacttctgtgacatctcagcagtcattcttctggcttgtaccaacacagatgttaacgaatttgtgatattcatttgtggagttcttgtacttgtggttccctttctgtttatctgtgtttcttatctctgcattctgaggactatcctgaagattccctcagctgagggcagacggaaagcgttttccacctgcgcctctcacctcagtgttgttattgttcattatggctgtgcttccttcatctacctgaggcctacagcaaactatgtgtccaacaaagacaggctggtgacggtgacatacacgattgtcactccattactaaaccccatggtttatagcctcaggaacaaagaagttaaaaaggccataaagaggttgttcaagagaaagtgctgcaggagaaggtgagcggccgc

SEQ ID NO: 693 - DNA, 1139 bp, synthetic construct
  source 1..1139: mol_type = other DNA; note = mmLucy-FLAG-rho-OR10R2(E205G,L228F)
ggatccgccaccatgagccaccagatcctgctgctcctggccctgctgaccctaggcctggctgattacaaggacgacgacgataagatcgaattgatgaacgggaccgagggcccaaacttctacgtgcctttctccaacaagacgggcgtggtggaattcatgttttacttctttccccctttgcagatcttggcagaaaacctcaccatggtcaccgaattcctgttgctgggtttttccagccttggtgaaattcagctggccctctttgtagtttttctttttctgtatctagtcattcttagtggcaatgtcaccattatcagtgtcatccacctggataaaagcctccacacaccaatgtacttcttccttggcattctctcaacatctgagaccttctacacctttgtcattctacccaagatgctcatcaatctactttctgtggccaggacaatctccttcaactgttgtgctcttcaaatgttcttcttccttggttttgccattaccaactgcctgctattgggtgtgatgggttatgatcgctatgctgccatttgtcaccctctgcattaccccactcttatgagctggcaggtgtgtggaaaactggcagctgcctgtgcaattggtggcttcttggcctctcttacagtagtaaatttagttttcagcctccctttttgtagcgccaacaaagtcaatcattacttctgtgacatctcagcagtcattcttctggcttgtaccaacacagatgttaacggatttgtgatattcatttgtggagttcttgtacttgtggttccctttctgtttatctgtgtttcttatttctgcattctgaggactatcctgaagattccctcagctgagggcagacggaaagcgttttccacctgcgcctctcacctcagtgttgttattgttcattatggctgtgcttccttcatctacctgaggcctacagcaaactatgtgtccaacaaagacaggctggtgacggtgacatacacgattgtcactccattactaaaccccatggtttatagcctcaggaacaaagaagttaaaaaggccataaagaggttgttcaagagaaagtgctgcaggagaaggtgagcggccgc

SEQ ID NO: 694 - DNA, 1115 bp, synthetic construct
  source 1..1115: mol_type = other DNA; note = mmLucy-FLAG-rho-OR10S1
ggatccgccaccatgagccaccagatcctgctgctcctggccctgctgaccctaggcctggctgattacaaggacgacgacgataagatcgaattgatgaacgggaccgagggcccaaacttctacgtgcctttctccaacaagacgggcgtggtggaattcatgacaacggagaaccccaaccagactgtggtgagccacttcttcctggagggtttgaggtacaccgctaaacattctagcctcttcttcctcctcttcctcctcatctacagcatcactgtggctgggaatctcctcatcctcctaactgtgggctctgactctcacctcagcttacccatgtaccacttcctggggcacctctccttcctggatgcctgtttgtctacagtgacagtgcccaaggtcatggcaggcctgctgactctggatgggaaggtgatctcctttgagggctgtgccgtacagctttattgcttccactttctggccagcactgagtgcttcctgtacacagtcatggcctatgaccgctatctggctatctgtcaacccctgcactacccagtggccatgaacagaaggatgtgtgcagaaatggctggaatcacctgggccataggtgccacgcacgctgcaatccacacctccctcaccttccgcctgctctactgtgggccttgccacattgcctacttcttctgcgacataccccctgtcctaaagctcgcctgtacagacaccaccattaatgagctagtcatgcttgccagcattggcatcgtggctgcaggctgcctcatcctcatcgttatttcctacatcttcatcgtggcagctgtgttgcgcatccgcacagcccagggccggcagcgggccttctccccctgcactgcccagctcactggggtgctcctgtactacgtgccacctgtctgtatctacctgcagcctcgctccagtgaggcaggagctggggcccctgctgtcttctacacaatcgtaactccaatgctcaacccattcatttacactttgaggaacaaagaagttaaaaaggccataaagaggttgttcaagagaaagtgctgcaggagaaggtgagcggccgc

SEQ ID NO: 695 - DNA, 1112 bp, synthetic construct
  source 1..1112: mol_type = other DNA; note = mmLucy-FLAG-rho-OR10T2
ggatccgccaccatgagccaccagatcctgctgctcctggccctgctgaccctaggcctggctgattacaaggacgacgacgataagatcgaattgatgaacgggaccgagggcccaaacttctacgtgcctttctccaacaagacgggcgtggtggaattcatgcgaggtttcaacaaaaccactgtggttacacagttcatcctggtgggtttctccagcctgggggagctccagctgctgctttttgtcatctttcttctcctatacttgacaatcctggtggccaatgtgaccatcatggccgttattcgcttcagctggactctccacactcccatgtatggctttctattcatcctttcattttctgagtcctgctacacttttgtcatcatccctcagctgctggtccacctgctctcagacaccaagaccatctccttcatggcctgtgccacccagctgttctttttccttggctttgcttgcaccaactgcctcctcattgctgtgatgggatatgatcgctatgtagcaatttgtcaccctctgaggtacacactcatcataaacaaaaggctggggttggagttgatttctctctcaggagccacaggtttctttattgctttggtggccaccaacctcatttgtgacatgcgtttttgtggccccaacagggttaaccactatttctgtgacatggcacctgttatcaagttagcctgcactgacacccatgtgaaagagctggctttatttagcctcagcatcctggtaattatggtgccttttctgttaattctcatatcctatggcttcatagttaacaccatcctgaagatcccctcagctgagggcaagaaggcctttgtcacctgtgcctcacatctcactgtggtctttgtccactatggctgtgcctctatcatctatctgcggcccaagtccaagtctgcctcagacaaggatcagttggtggcagtgacctacacagtggttactcccttacttaatcctcttgtctacagtctgaggaacaaagaagttaaaaaggccataaagaggttgttcaagagaaagtgctgcaggagaaggtgagcggccgc

SEQ ID NO: 696 - DNA, 1112 bp, synthetic construct
  source 1..1112: mol_type = other DNA; note = mmLucy-FLAG-rho-OR10T2(I137M,V239A)
ggatccgccaccatgagccaccagatcctgctgctcctggccctgctgaccctaggcctggctgattacaaggacgacgacgataagatcgaattgatgaacgggaccgagggcccaaacttctacgtgcctttctccaacaagacgggcgtggtggaattcatgcgaggtttcaacaaaaccactgtggttacacagttcatcctggtgggtttctccagcctgggggagctccagctgctgctttttgtcatctttcttctcctatacttgacaatcctggtggccaatgtgaccatcatggccgttattcgcttcagctggactctccacactcccatgtatggctttctattcatcctttcattttctgagtcctgctacacttttgtcatcatccctcagctgctggtccacctgctctcagacaccaagaccatctccttcatggcctgtgccacccagctgttctttttccttggctttgcttgcaccaactgcctcctcattgctgtgatgggatatgatcgctatgtagcaatttgtcaccctctgaggtacacactcatcatgaacaaaaggctggggttggagttgatttctctctcaggagccacaggtttctttattgctttggtggccaccaacctcatttgtgacatgcgtttttgtggccccaacagggttaaccactatttctgtgacatggcacctgttatcaagttagcctgcactgacacccatgtgaaagagctggctttatttagcctcagcatcctggtaattatggtgccttttctgttaattctcatatcctatggcttcatagttaacaccatcctgaagatcccctcagctgagggcaagaaggcctttgccacctgtgcctcacatctcactgtggtctttgtccactatggctgtgcctctatcatctatctgcggcccaagtccaagtctgcctcagacaaggatcagttggtggcagtgacctacacagtggttactcccttacttaatcctcttgtctacagtctgaggaacaaagaagttaaaaaggccataaagaggttgttcaagagaaagtgctgcaggagaaggtgagcggccgc

SEQ ID NO: 697 - DNA, 1115 bp, synthetic construct
  source 1..1115: mol_type = other DNA; note = mmLucy-FLAG-rho-OR10V1
ggatccgccaccatgagccaccagatcctgctgctcctggccctgctgaccctaggcctggctgattacaaggacgacgacgataagatcgaattgatgaacgggaccgagggcccaaacttctacgtgcctttctccaacaagacgggcgtggtggaattcatggaaggaataaataaaactgcaaagatgcagtttttctttcgtccattctcacctgaccctgaggtccagatgctgatttttgtggtcttcctgatgatgtatctgaccagcctcggtggaaatgctacaattgcagtcattgttcagatcaatcattccctccacacccccatgtactttttcctggctaatctggcagttctagaaatcttctatacatcttccatcaccccattggccttggcaaacctcctttcaatgggcaaaactcctgtttccatcacgggatgtggcacccagatgtttttctttgtcttcttgggtggggctgattgtgtcctgctggtagtcatggcttatgaccagtttatagcgatctgtcaccctctgcgatacaggctcatcatgagctggtccttgtgtgtggagctgctggtaggctccttggtgctggggttcctgttgtcactgccactcaccattttaatcttccatctcccattctgccacaatgatgagatctaccacttctactgtgacatgcctgcagtcatgcgcctggcttgtgcagacacacgcgttcacaagactgctctgtatatcatcagcttcatcgtccttagcatccccctctcattgatctccatctcctatgtcttcatcgtggtagccattttacggatccggtcagcagaagggcgccagcaagcctactctacctgctcttctcacatcttagtggtcctcctgcagtatggctgcaccagctttatatacttgtcccccagttccagctactctcctgagatgggccgggtggtatctgtggcctacacatttatcactcccattttaaaccccttgatctatagtttgaggaacaaagaagttaaaaaggccataaagaggttgttcaagagaaagtgctgcaggagaaggtgagcggccgc

SEQ ID NO: 698 - DNA, 1085 bp, synthetic construct
  source 1..1085: mol_type = other DNA; note = mmLucy-FLAG-rho-OR10W1
ggatccgccaccatgagccaccagatcctgctgctcctggccctgctgaccctaggcctggctgattacaaggacgacgacgataagatcgaattgatgaacgggaccgagggcccaaacttctacgtgcctttctccaacaagacgggcgtggtggaattcatggaatttgtgttcctggcctatccctcctgcccagaactgcatattctgtccttccttggggtcagcctggtttatggtttgatcatcactgggaacattctcattgtggtgtccattcacacagaaacctgtctatgcacatccatgtactatttcctgggcagcctttctgggattgaaatatgctacactgcagtggtggtgccccatatcctggccaacaccctacagtcagagaagaccatcactctcctgggctgtgccacccagatggctttcttcattgcactgggcagtgctgattgcttcctcttggctgccatggcctatgaccgctatgtggccatttgccacccgttgcagtaccctctcctcatgacattgactctttgtgtccacttggttgtggcatcagtcatcagtggtctgttcctgtccttacaactggtggccttcatcttctctctgccattctgccaggctcagggcattgagcacttcttttgtgatgtgccaccagtcatgcatgttgtttgtgctcagagtcacattcatgagcagtcagtgctggtggcagccatactagccattgctgtgcctttcttcctcatcaccacctcctacaccttcatagtggctgctctgctcaagatccactcggctgctggccgccaccgggccttctccacctgctcttcccacctcactgtggtgctgctgcagtatggctgctgtgccttcatgtacctgtgccccagctccagctacaaccccaagcaagatcggttcatctcactggtgtacacattgggaaccccactgctcaacccacttatctatgccctgaggaacaaagaagttaaaaaggccataaagaggttgttcaagagaaagtgctgcaggagaaggtgagcggccgc

SEQ ID NO: 699 - DNA, 1085 bp, synthetic construct
  source 1..1085: mol_type = other DNA; note = mmLucy-FLAG-rho-OR10W1(R263Q)
ggatccgccaccatgagccaccagatcctgctgctcctggccctgctgaccctaggcctggctgattacaaggacgacgacgataagatcgaattgatgaacgggaccgagggcccaaacttctacgtgcctttctccaacaagacgggcgtggtggaattcatggaatttgtgttcctggcctatccctcctgcccagaactgcatattctgtccttccttggggtcagcctggtttatggtttgatcatcactgggaacattctcattgtggtgtccattcacacagaaacctgtctatgcacatccatgtactatttcctgggcagcctttctgggattgaaatatgctacactgcagtggtggtgccccatatcctggccaacaccctacagtcagagaagaccatcactctcctgggctgtgccacccagatggctttcttcattgcactgggcagtgctgattgcttcctcttggctgccatggcctatgaccgctatgtggccatttgccacccgttgcagtaccctctcctcatgacattgactctttgtgtccacttggttgtggcatcagtcatcagtggtctgttcctgtccttacaactggtggccttcatcttctctctgccattctgccaggctcagggcattgagcacttcttttgtgatgtgccaccagtcatgcatgttgtttgtgctcagagtcacattcatgagcagtcagtgctggtggcagccatactagccattgctgtgcctttcttcctcatcaccacctcctacaccttcatagtggctgctctgctcaagatccactcggctgctggccgccaccgggccttctccacctgctcttcccacctcactgtggtgctgctgcagtatggctgctgtgccttcatgtacctgtgccccagctccagctacaaccccaagcaagatcagttcatctcactggtgtacacattgggaaccccactgctcaacccacttatctatgccctgaggaacaaagaagttaaaaaggccataaagaggttgttcaagagaaagtgctgcaggagaaggtgagcggccgc

SEQ ID NO: 700 - DNA, 1100 bp, synthetic construct
  source 1..1100: mol_type = other DNA; note = mmLucy-FLAG-rho-OR10X1
ggatccgccaccatgagccaccagatcctgctgctcctggccctgctgaccctaggcctggctgattacaaggacgacgacgataagatcgaattgatgaacgggaccgagggcccaaacttctacgtgcctttctccaacaagacgggcgtggtggaattcatgaagatcaaccagacaatcctgaaggaattcattcttgttggcttttctgtgtacccacatgtacagacatttctttttgtggtcttcttttgtctctaccttctcacccttgcaggtaatctgatcatcatgggtctaacttgggtggacaggtccctccacacccctatgtatctcttccttagtgcactctccttctctgagacctgctatacgctgaccatcgtccccaagatgctggaagatctactggccaaggacagaagcatttcagtcacaggttgtagcttacagatgtgcttcttcttgggacttggtggcacaaactgtatcattctcactttgatgggatatgaccgcttcctggccatctgtaaccctctaagatatccactgcttatgaccaacattgtatgtggacaacttgtggcctctgcttgcactgcaggcttctttatctctcttacagagactgcactgatattcagggactctttctgcagacccaaccttgtcaaacacttcttctgccatatgctggcagttattaggctgtcttgtatagacagtaaccacacagaattcattataacactgatctcagtgtctggtttgctgggtacccttctgctcatcatcctgactgatgtcttcattatttctactgtcctcaggatcccttcagctgagggcaagcagaaggccttcaccacctgtgcctcccacctcaccgtggttataatccactttggttttgcatctattgtttatttgaagccagaagcctcaggagatgacacactcatagcagtcccttatactgtcattacccccttcctcagccccatcatattcagcctgaggaacaaagaagttaaaaaggccataaagaggttgttcaagagaaagtgctgcaggagaaggtgagcggccgc

SEQ ID NO: 701 - DNA, 1112 bp, synthetic construct
  source 1..1112: mol_type = other DNA; note = mmLucy-FLAG-rho-OR10Z1
ggatccgccaccatgagccaccagatcctgctgctcctggccctgctgaccctaggcctggctgattacaaggacgacgacgataagatcgaattgatgaacgggaccgagggcccaaacttctacgtgcctttctccaacaagacgggcgtggtggaattcatggggcagaccaacgtaacctcctggagggattttgtcttcctgggcttctccagttctggggagttgcagctccttctctttgccttgttcctctctctgtatctagtcactctgaccagcaatgtcttcattatcatagccatcaggctggatagccatctgcacacccccatgtacctcttcctttccttcctatccttctctgagacctgctacactttgggcatcatccctagaatgctctctggcctggctgggggggaccaggctatctcctatgtgggctgtgctgcccagatgttcttttctgcctcatgggcctgtactaactgcttccttctggctgccatgggctttgacagatatgtggccatctgtgctccactccactatgccagccacatgaatcctaccctctgtgcccagctggtcattacttccttcctgactggatacctctttggactgggaatgacactagttattttccacctctcattctgcagctcccatgaaatccagcactttttttgtgacacgccacctgtgctgagcctagcctgtggagatacaggcccgagtgagctgaggatctttatcctcagtcttttggtcctcttggtctccttcttcttcatcaccatctcctacgcctacatcttggcagcaatactgaggatcccctctgctgaggggcagaagaaggccttctccacttgtgcctcgcaccttacagtggtcattattcattatggctgtgcttccttcgtgtacctgaggcccaaagccagctactctcttgagagagatcagcttattgccatgacctatactgtagtgacccccctccttaatcccattgtttatagtctaaggaacaaagaagttaaaaaggccataaagaggttgttcaagagaaagtgctgcaggagaaggtgagcggccgc

SEQ ID NO: 702 - DNA, 1115 bp, synthetic construct
  source 1..1115: mol_type = other DNA; note = mmLucy-FLAG-rho-OR11A1
ggatccgccaccatgagccaccagatcctgctgctcctggccctgctgaccctaggcctggctgattacaaggacgacgacgataagatcgaattgatgaacgggaccgagggcccaaacttctacgtgcctttctccaacaagacgggcgtggtggaattcatggaaattgtctccacaggaaacgaaactattactgaatttgtcctccttggcttctatgacatccctgaactgcatttcttgttttttattgtattcactgctgtctatgtcttcatcatcatagggaatatgctgattattgtagcagtggttagctcccagaggctccacaaacccatgtatattttcttggcgaatctgtccttcctggatattctctacacctccgcagtgatgccaaaaatgctggagggcttcctgcaagaagcaactatctctgtggctggttgcttgctccagttctttatcttcggctctctagccacagctgaatgcttactgctggctgtcatggcatatgaccgctacctggcaatttgctacccactccactacccactcctgatggggcccagacggtacatggggctggtggtcacaacctggctctctggatttgtggtagatggactggttgtggccctggtggcccagctgaggttctgtggccccaaccacattgaccagttttactgtgactttatgcttttcgtgggcctggcttgctcggatcccagagtggctcaggtgacaactctcattctgtctgtgttctgcctcactattccttttggactgattctgacatcttatgccagaattgtggtggcagtgctgagagttcctgctggggcaagcaggagaagggctttctccacatgctcctcccacctagctgtagtgaccacattctatggaacgctcatgatcttttatgttgcaccctctgctgtccattcccagctcctctccaaggtcttctccctgctctacactgtggtcacccctctcttcaatcctgtgatctataccatgaggaacaaagaagttaaaaaggccataaagaggttgttcaagagaaagtgctgcaggagaaggtgagcggccgc

SEQ ID NO: 703 - DNA, 1124 bp, synthetic construct
  source 1..1124: mol_type = other DNA; note = mmLucy-FLAG-rho-OR11G2
ggatccgccaccatgagccaccagatcctgctgctcctggccctgctgaccctaggcctggctgattacaaggacgacgacgataagatcgaattgatgaacgggaccgagggcccaaacttctacgtgcctttctccaacaagacgggcgtggtggaattcatgaaaatcttcaacagccccagcaactccagcaccttcactggcttcatcctcctgggcttcccttgccccagggaggggcagatcctcctctttgtgctcttcactgttgtttacctcctgaccctcatgggcaatggttccatcatctgtgctgtgcactgggatcagagactccacgcccccatgtacatcctgctcgccaacttctccttcttggagatatgttatgtcacctccacagtccccagcatgctggccaacttcctctctgacaccaagatcatctcgttctctggctgcttcctccagttctactttttcttctccttgggctctacagaatgctttttcctggcagttatggcatttgatcgataccttgccatctgtcggcctctacgctatccaaccattatgaccagacgtctctgtaccaatcttgtggtcaattgctgggtacttggtttcatctggttcttgattcctatcgtcaacatctcccaaatgtccttctgtggatctaggattattgaccacttcctatgtgacccagctcctcttctaactctcacttgcaaaaaaggccctgtgatagagcttgtcttttctgtcttaagtcctctgcctgtctttatgctctttctcttcattgtggggtcctatgctctggtcgtgagagctgtgttgagggtcccttcagcagctgggagaagaaaggctttctccacctgtgggtctcacctggctgtggtttcactgttctacggctcagtactggtcatgtatgggagcccaccatctaagaatgaagctggaaagcagaagactgtgactctgttttattctgttgttaccccactgcttaaccctgtgatatatagtcttaggaacaaagaagttaaaaaggccataaagaggttgttcaagagaaagtgctgcaggagaaggtgagcggccgc

SEQ ID NO: 704 - DNA, 1124 bp, synthetic construct
  source 1..1124: mol_type = other DNA; note = mmLucy-FLAG-rho-OR11G2(I65N,V82I)
ggatccgccaccatgagccaccagatcctgctgctcctggccctgctgaccctaggcctggctgattacaaggacgacgacgataagatcgaattgatgaacgggaccgagggcccaaacttctacgtgcctttctccaacaagacgggcgtggtggaattcatgaaaatcttcaacagccccagcaactccagcaccttcactggcttcatcctcctgggcttcccttgccccagggaggggcagatcctcctctttgtgctcttcactgttgtttacctcctgaccctcatgggcaatggttccatcatctgtgctgtgcactgggatcagagactccacgcccccatgtacaacctgctcgccaacttctccttcttggagatatgttatgtcacctccacaatccccagcatgctggccaacttcctctctgacaccaagatcatctcgttctctggctgcttcctccagttctactttttcttctccttgggctctacagaatgctttttcctggcagttatggcatttgatcgataccttgccatctgtcggcctctacgctatccaaccattatgaccagacgtctctgtaccaatcttgtggtcaattgctgggtacttggtttcatctggttcttgattcctatcgtcaacatctcccaaatgtccttctgtggatctaggattattgaccacttcctatgtgacccagctcctcttctaactctcacttgcaaaaaaggccctgtgatagagcttgtcttttctgtcttaagtcctctgcctgtctttatgctctttctcttcattgtggggtcctatgctctggtcgtgagagctgtgttgagggtcccttcagcagctgggagaagaaaggctttctccacctgtgggtctcacctggctgtggtttcactgttctacggctcagtactggtcatgtatgggagcccaccatctaagaatgaagctggaaagcagaagactgtgactctgttttattctgttgttaccccactgcttaaccctgtgatatatagtcttaggaacaaagaagttaaaaaggccataaagaggttgttcaagagaaagtgctgcaggagaaggtgagcggccgc

SEQ ID NO: 705 - DNA, 1124 bp, synthetic construct
  source 1..1124: mol_type = other DNA; note = mmLucy-FLAG-rho-OR11H1
ggatccgccaccatgagccaccagatcctgctgctcctggccctgctgaccctaggcctggctgattacaaggacgacgacgataagatcgaattgatgaacgggaccgagggcccaaacttctacgtgcctttctccaacaagacgggcgtggtggaattcatgaatgtctctgagccaaattccagctttgcttttgtaaatgaatttatactccaaggtttctcttgtgagtggacaattcagatcttcctcttctcactctttactacaacatatgcactgactataacagggaatggagccattgcttttgtcctgtggtgtgaccggcgacttcacactcccatgtacatgttcctgggaaatttctcctttttagagatatggtatgtctcttctacagttcccaagatgttggtcaacttcctttcagagaaaaaaaacatctcctttgctggatgttttctccagttttatttcttcttctctttgggtacatcagaatgcttgcttttgactgtgatggcctttgatcagtaccttgctatctgccgtcccttgctctatcctaatatcatgactgggcatctctatgccaaactggtcatactgtgctgggtttgtggatttctgtggttcctgatccccattgttctcatctctcagatgcccttctgtggcccaaacattattgaccatgttgtgtgtgacccagggccacgatttgcattggattgtgtttctgccccaagaatccaactgttttgctacactctaagctcattagttatttttggtaacttcctctttattattggatcctatactcttgtcctgaaagctatgttgggtatgccttcaagcactgggagacataaggccttctctacctgtgggtctcatttggctgtggtatcactgtgctatagctctcttatggtcatgtatgtgagcccaggactcggacattctacagggatgcagaaaattgaaactttgttctatgctatggtgaccccactcttcaatccccttatctatagcctcaggaacaaagaagttaaaaaggccataaagaggttgttcaagagaaagtgctgcaggagaaggtgagcggccgc

SEQ ID NO: 706 - DNA, 1124 bp, synthetic construct
  source 1..1124: mol_type = other DNA; note = mmLucy-FLAG-rho-OR11H12
ggatccgccaccatgagccaccagatcctgctgctcctggccctgctgaccctaggcctggctgattacaaggacgacgacgataagatcgaattgatgaacgggaccgagggcccaaacttctacgtgcctttctccaacaagacgggcgtggtggaattcatgaatgtctctgagccaaattccagctttgcttttgtaaatgaatttatactccaaggtttcacttgtgagtggacaattcagatcttcctcttctcactctttactacaacatatgcactgactataacagggaatggagccattgcttttgtcctgtggtgtgactggcgacttcacactcccatgtacatgttcctgggaaatttctcctttttagagatatggtatgtctcttctacagttcccaagatgttggtcaacttcctttcagagaaaaaaaacatctcctttgctggatgttttctccagttttatttcttcttctctttgggtacatcagaatgcttgcttttgactgtgatggcctttgatcagtaccttgctatctgccgtcccttgctctatcctaatatcatgactgggcatctctgtgccaaactggtcatactgtgctgggtttgtggatttctgtggttcctgatccccattgttctcatctctcagatgcccttctgtggcccaaacattattgaccatgttgtgtgtgacccagggccacgatttgcattggattgtgtttctgccccaagaatccaactgttttgctacactctaagctcattagttatttttggtaacttcctctttattattggatcctatactcttgtcctgaaagctgtgttgggtatgccttcaagcactgggagacataaggccttctctacctgtgggtctcatttggctgtggtatcactgtgctatagctctcttatggtcatgtatgtgagcccaggactcggacattctacagggatgcagaaaattgaaactttgttctatgctatggtgaccccactcttcaatccccttatctatagcctcaggaacaaagaagttaaaaaggccataaagaggttgttcaagagaaagtgctgcaggagaaggtgagcggccgc

SEQ ID NO: 707 - DNA, 1124 bp, synthetic construct
  source 1..1124: mol_type = other DNA; note = mmLucy-FLAG-rho-OR11H2
ggatccgccaccatgagccaccagatcctgctgctcctggccctgctgaccctaggcctggctgattacaaggacgacgacgataagatcgaattgatgaacgggaccgagggcccaaacttctacgtgcctttctccaacaagacgggcgtggtggaattcatgaatgtctctgagccaaattccagctttgcttttgtaaatgaatttatactccaaggtttctcttgtgagtggacaattcagatcttcctcttctcactctttactacaatatatgcactgactataacagggaatggagccattgcttttgtcctgtggtgtgaccggcgacttcacactcccatgtacatgttcctgggaaatttctcctttttagagatatggtatgtctcttctacagttcccaagatgttggtcaacttcctttcagagaaaaaaaacatctcctttgctggatgttttctccagttttatttcttcttctctttgggtacatcagaatgcttgcttttgactgtgatggcctttgatcagtaccttgctatctgccgtcccttgctctatcctaatatcatgactgggcatctctatgccaaactggtcatactgtgctgggtttgtggatttctgtggttcctgatccccattgttctcatctctcagaagcccttctgtggcccaaacattattgaccatgttgtgtgtgacccagggccactatttgcattggattgtgtttctgccccaagaatccaactgttttgctacactctaagctcattagttatttttggtaacttcctctttattattggatcctatactcttgtcctgaaagctgtgttgggtatgccttcaagcactgggagacataaggccttctctacctgtgggtctcatttggctgtggtatcactgtgctatagccctcttatggtcatgtatgtgagcccaggactcggacattctacagggatgcagaaaattgaaactttgttctatgctatggtgaccccactcttcaatccccttatctatagcctcaggaacaaagaagttaaaaaggccataaagaggttgttcaagagaaagtgctgcaggagaaggtgagcggccgc

SEQ ID NO: 708 - DNA, 1112 bp, synthetic construct
  source 1..1112: mol_type = other DNA; note = mmLucy-FLAG-rho-OR11H4
ggatccgccaccatgagccaccagatcctgctgctcctggccctgctgaccctaggcctggctgattacaaggacgacgacgataagatcgaattgatgaacgggaccgagggcccaaacttctacgtgcctttctccaacaagacgggcgtggtggaattcatgaacaggtcagcaacacacatcgtgacagagtttattctcctgggattccctggttgctggaagattcagattttcctcttctcattgtttttggtgatttatgtcttgaccttgctgggaaatggagccatcatctatgcagtgagatgcaacccactactacacacccccatgtactttctgctgggaaattttgccttccttgagatctggtatgtgtcctccactattcctaacatgctagtcaacattctctccaagaccaaggccatctcattttctgggtgcttcctccagttctatttcttcttttcactgggaacaactgaatgtctctttctggcagtaatggcttatgatcgatacctggccatctgccacccactgcagtaccctgccatcatgactgtaaggttctgtggtaagctggtgtctttctgttggcttattggattccttggatacccaattcccattttctacatctcccaactccccttctgtggtcctaatatcattgatcacttcctgtgtgacatggacccattgatggctctatcctgtgccccagctcccataactgaatgtattttctatactcagagctcccttgtcctctttttcactagtatgtacattcttcgatcctatatcctgttactaacagctgtttttcaggtcccttctgcagctggtcggagaaaagccttctctacctgtggttctcatttggttgtggtatctcttttctatgggacagtcatggtaatgtatgtaagtcctacatatgggatcccaactttattgcagaagatcctcacactggtatattcagtaacgactcctctttttaatcctctgatctatactcttaggaacaaagaagttaaaaaggccataaagaggttgttcaagagaaagtgctgcaggagaaggtgagcggccgc

SEQ ID NO: 709 - DNA, 1097 bp, synthetic construct
  source 1..1097: mol_type = other DNA; note = mmLucy-FLAG-rho-OR11H6
ggatccgccaccatgagccaccagatcctgctgctcctggccctgctgaccctaggcctggctgattacaaggacgacgacgataagatcgaattgatgaacgggaccgagggcccaaacttctacgtgcctttctccaacaagacgggcgtggtggaattcatgcattttgtgactgagtttgtcctcctgggtttccatggtcaaagggagatgcagagctgcttcttctcattcatcctggttctctatctcctgacactgctagggaatggagctattgtctgtgcagtgaaattggacaggcggctccacacacccatgtacatccttctgggaaactttgcctttctagagatctggtacatttcctccactgtcccaaacatgctagtcaatatcctctctgagattaaaaccatctccttctctggttgcttcctgcaattctatttctttttttcactgggtacaacagagtgtttctttttatcagttatggcttatgatcggtacctggccatctgtcgtccattacactacccctccatcatgactgggaagttctgtataattctggtctgtgtatgctgggtaggcggatttctctgctatccagtccctattgttcttatctcccaacttcccttctgtgggcccaacatcattgaccacttggtgtgtgacccaggcccattgtttgcactggcctgcatctctgctccttccactgagcttatctgttacaccttcaactcgatgattatctttgggcccttcctctccatcttgggatcttacactctggtcatcagagctgtgctttgtattccctctggtgctggtcgaactaaagctttctccacatgtgggtcccacctaatggtggtgtctctattctatggaacccttatggtgatgtatgtgagcccaacatcagggaacccagcaggaatgcagaagatcatcactctggtatacacagcaatgactccattcttaaatccccttatctatagtcttaggaacaaagaagttaaaaaggccataaagaggttgttcaagagaaagtgctgcaggagaaggtgagcggccgc

SEQ ID NO: 710 - DNA, 1097 bp, synthetic construct
  source 1..1097: mol_type = other DNA; note = mmLucy-FLAG-rho-OR11H6(I84T,L172F,Y213H,C236R)
ggatccgccaccatgagccaccagatcctgctgctcctggccctgctgaccctaggcctggctgattacaaggacgacgacgataagatcgaattgatgaacgggaccgagggcccaaacttctacgtgcctttctccaacaagacgggcgtggtggaattcatgcattttgtgactgagtttgtcctcctgggtttccatggtcaaagggagatgcagagctgcttcttctcattcatcctggttctctatctcctgacactgctagggaatggagctattgtctgtgcagtgaaattggacaggcggctccacacacccatgtacatccttctgggaaactttgcctttctagagatctggtacatttcctccactgtcccaaacatgctagtcaatatcctctctgagactaaaaccatctccttctctggttgcttcctgcaattctatttctttttttcactgggtacaacagagtgtttctttttatcagttatggcttatgatcggtacctggccatctgtcgtccattacactacccctccatcatgactgggaagttctgtataattctggtctgtgtatgctgggtaggcggatttctctgctatccagtccctattgttcttatctcccaacttcccttctgtgggcccaacatcattgaccacttcgtgtgtgacccaggcccattgtttgcactggcctgcatctctgctccttccactgagcttatctgttacaccttcaactcgatgattatctttgggcccttcctctccatcttgggatctcacactctggtcatcagagctgtgctttgtattccctctggtgctggtcgaactaaagctttctccacacgtgggtcccacctaatggtggtgtctctattctatggaacccttatggtgatgtatgtgagcccaacatcagggaacccagcaggaatgcagaagatcatcactctggtatacacagcaatgactccattcttaaatccccttatctatagtcttaggaacaaagaagttaaaaaggccataaagaggttgttcaagagaaagtgctgcaggagaaggtgagcggccgc

SEQ ID NO: 711 - DNA, 1112 bp, synthetic construct
  source 1..1112: mol_type = other DNA; note = mmLucy-FLAG-rho-OR11L1(G108S,F117L,A142T,R171P)
ggatccgccaccatgagccaccagatcctgctgctcctggccctgctgaccctaggcctggctgattacaaggacgacgacgataagatcgaattgatgaacgggaccgagggcccaaacttctacgtgcctttctccaacaagacgggcgtggtggaattcatggagccccaaaatacctccactgtgactaactttcagctgttaggattccagaaccttcttgaatggcaggccctgctctttgtcattttcctgctcatctactgcctgaccattatagggaatgttgtcatcatcaccgtggtgagccagggcctgcgactgcactcccctatgtacatgttcctccagcatctctcctttctggaggtctggtacacgtccaccactgtgccccttctcctagccaacctgctgtcctggggccaagccatctccttctctgcctgcatggcacagctctacttcttcgtattcctcagcgccaccgagtgctttctcctggccttgatggcctatgaccgttacctggccatctgcagcccactccgctaccccttcctcatgcatcgtgggctctgtaccaggttggtggtggtctcctggtgcacaggggtcagcacaggctttctgccttccctgatgatttccaggttggacttctgtgggcccaatcagattaaccatttcttctgcgacctcccgccactcatgcagctctcctgttccagagtttatatcaccgaggtgaccatcttcatcctgtcaattgccgtgctgtgcatttgtttttttctgacactggggccctatgttttcattgtgtcctccatattgagaatcccttccacctctggccggagaaagaccttttccacatgtggctcccacctggctgttgtcactctctactacgggaccatgatctccatgtatgtgtgtcccagtccccacctgttgcctgaaatcaacaagatcatttctgtcttctacactgtggtcacaccactgctgaacccagttatctacagcttgaggaacaaagaagttaaaaaggccataaagaggttgttcaagagaaagtgctgcaggagaaggtgagcggccgc

SEQ ID NO: 712 - DNA, 1109 bp, synthetic construct
  source 1..1109: mol_type = other DNA; note = mmLucy-FLAG-rho-OR12D2(S104F)
ggatccgccaccatgagccaccagatcctgctgctcctggccctgctgaccctaggcctggctgattacaaggacgacgacgataagatcgaattgatgaacgggaccgagggcccaaacttctacgtgcctttctccaacaagacgggcgtggtggaattcatgctgaatacaacctcagtcaccgaatttctcctcttgggagtgacagacattcaagaactgcagccttttctcttcgtggttttcctcaccatctacttcatcagtgtgactgggaatggagccgttctgatgattgtcatctccgatcctagactccattcccttatgtatttcttcctgggaaacctgtcctacctggatatctgttactctacggtgacactgccaaaaatgctgcagaactttctctctacacacaaagcaatttctttcttgggatgcataagccagcttcatttcttccacttcctgggcagcacggagtccatgttgttcgccgtgatggcatttgacctctctgtggctatctgcaagccacttcgctacactgtcatcatgaaccctcagctctgtacccagatggccatcacaatctgggtcattggttttttccatgccctgctgcactccgtaatgacttctcgcttgaacttctgtggttccaaccgtatccatcattttctctgtgatattaagccattgctaaagctggcctgtgggaacactgagcttaatcagtggctactcagtactgtcacggggacaattgccatgggccccttctttctgacacttctctcctatttctacattatcacttatctcttcttcaagacccgttcttgtagcatgctctgtaaagcactgtccacttgtgcctcccacttcatggtagttattcttttctatgcacctgttcttttcacctatatccatcctgcgttagagagcttcatggaccaggaccggattgttgccatcatgtacactgtggtcactcctgtactaaacccactgatctatactttgaggaacaaagaagttaaaaaggccataaagaggttgttcaagagaaagtgctgcaggagaaggtgagcggccgc

SEQ ID NO: 713 - DNA, 1109 bp, synthetic construct
  source 1..1109: mol_type = other DNA; note mmLucy-FLAG-rho-OR12D2(V47F,L56P,S104F,F113L,L120R,S121C,V1 59I)
ggatccgccaccatgagccaccagatcctgctgctcctggccctgctgaccctaggcctggctgattacaaggacgacgacgataagatcgaattgatgaacgggaccgagggcccaaacttctacgtgcctttctccaacaagacgggcgtggtggaattcatgctgaatacaacctcagtcaccgaatttctcctcttgggagtgacagacattcaagaactgcagccttttctcttcgtggttttcctcaccatctacttcatcagtgtgactgggaatggagccgttctgatgattttcatctccgatcctagactccattcccctatgtatttcttcctgggaaacctgtcctacctggatatctgttactctacggtgacactgccaaaaatgctgcagaactttctctctacacacaaagcaatttctttcttgggatgcataagccagcttcatttcttccacttcctgggcagcacggagtccatgttgctcgccgtgatggcatttgaccgctgtgtggctatctgcaagccacttcgctacactgtcatcatgaaccctcagctctgtacccagatggccatcacaatctgggtcattggttttttccatgccctgctgcactccataatgacttctcgcttgaacttctgtggttccaaccgtatccatcattttctctgtgatattaagccattgctaaagctggcctgtgggaacactgagcttaatcagtggctactcagtactgtcacggggacaattgccatgggccccttctttctgacacttctctcctatttctacattatcacttatctcttcttcaagacccgttcttgtagcatgctctgtaaagcactgtccacttgtgcctcccacttcatggtagttattcttttctatgcacctgttcttttcacctatatccatcctgcgttagagagcttcatggaccaggaccggattgttgccatcatgtacactgtggtcactcctgtactaaacccactgatctatactttgaggaacaaagaagttaaaaaggccataaagaggttgttcaagagaaagtgctgcaggagaaggtgagcggccgc

SEQ ID NO: 714 - DNA, 1109 bp, synthetic construct
  source 1..1109: mol_type = other DNA; note = mmLucy-FLAG-rho-OR12D3
ggatccgccaccatgagccaccagatcctgctgctcctggccctgctgaccctaggcctggctgattacaaggacgacgacgataagatcgaattgatgaacgggaccgagggcccaaacttctacgtgcctttctccaacaagacgggcgtggtggaattcatggagaatgtcactacaatgaatgagtttcttctacttggcctgactggtgttcaggagctgcagcctttcttctttgggattttcttaatcatttacctgataaacttgattggaaatggatctatattggtgatggttgttttggaaccacaactccactcccctatgtatttttttctgggaaacctttcttgtctggatatttcttattcttcagtgacactgcccaagctgctcgtaaacctcgtgtgcagtcgcagggctatatcttttctaggctgtatcacccagctacacttcttccactttttgggaagcacagaggccattttactggctatcatggcctttgaccgttttgttgccatctgcaatcctcttcgctacactgtcatcatgaacccccaggtgtgtattctgttggcagctgcggcctggctcatcagcttcttttacgctctgatgcattctgtcatgactgcacacctgagtttttgtggctctcagaaactcaatcacttcttctacgatgtcaagccgctcttagaattggcctgtagtgacacattactcaatcaatggcttctttccattgtcacaggcagcatatccatgggagctttctttctgactcttctctcctgcttctatgtaattggcttccttctgtttaagaacaggtcctgcagaatactccacaaggctctgtccacttgtgcctcccattttatggtggtatgtcttttctatggacctgtgggcttcacatatattcgtcctgcttcagccacctccatgattcaggaccggataatggccatcatgtatagcgccgtcacccctgtactgaatccactaatctacacccttaggaacaaagaagttaaaaaggccataaagaggttgttcaagagaaagtgctgcaggagaaggtgagcggccgc

SEQ ID NO: 715 - DNA, 1109 bp, synthetic construct
  source 1..1109: mol_type = other DNA; note = mmLucy-FLAG-rho-OR13A1
ggatccgccaccatgagccaccagatcctgctgctcctggccctgctgaccctaggcctggctgattacaaggacgacgacgataagatcgaattgatgaacgggaccgagggcccaaacttctacgtgcctttctccaacaagacgggcgtggtggaattcatgatgagtaaccagacgttggtaaccgagttcatcctgcagggcttttcggagcacccagaataccgggtgttcttattcagctgtttcctcttcctctactctggggccctcacaggtaatgtcctcatcaccttggccatcacgttcaaccctgggctccacgctcctatgtactttttcttactcaacttggctactatggacattatctgcacctcttccatcatgcccaaggcgctggccagtctggtgtcggaagagagctccatctcctacgggggctgcatggcccagctctatttcctcacgtgggctgcatcctcagagctgctgctcctcacggtcatggcctatgaccggtacgcagccatctgccacccgctgcattacagcagcatgatgagcaaggtgttctgcagcgggctggccacagccgtgtggctgctctgcgccgtcaacacggccatccacacggggctgatgctgcgcttggatttctgtggccccaatgtcattatccatttcttctgcgaggtccctcccctgctgcttctctcctgcagctccacctacgtcaacggtgtcatgattgtcctggcggatgctttctacggcatagtgaacttcctgatgaccatcgcgtcctatggcttcatcgtctccagcatcctgaaggtgaagactgcctgggggaggcagaaagccttctccacctgctcttcccacctcaccgtggtgtgcatgtattacaccgctgtcttctacgcctacataagcccggtctctggctacagcgcagggaagagcaagttggctggcctgctgtacactgtgctgagtcctaccctcaaccccctcatctatactttgaggaacaaagaagttaaaaaggccataaagaggttgttcaagagaaagtgctgcaggagaaggtgagcggccgc

SEQ ID NO: 716 - DNA, 1130 bp, synthetic construct
  source 1..1130: mol_type = other DNA; note = mmLucy-FLAG-rho-OR13C2
ggatccgccaccatgagccaccagatcctgctgctcctggccctgctgaccctaggcctggctgattacaaggacgacgacgataagatcgaattgatgaacgggaccgagggcccaaacttctacgtgcctttctccaacaagacgggcgtggtggaattcatggaatgggaaaaccacaccattctggtggaattttttctgaagggactttctggtcacccaagacttgagttactcttttttgtgctcatcttcataatgtatgtggtcatccttctggggaatggtactctcattttaatcagcatcttggaccctcaccttcacacccctatgtacttctttctggggaacctctccttcttggacatctgctacaccaccacctctattccctccacgctagtgagcttcctttcagaaagaaagaccatttccctttctggctgtgcagtgcagatgttcctcggcttggccatggggacaacagagtgtgtgcttctgggcatgatggcctttgaccgctatgtggctatctgcaaccctctgagatatcccatcatcatgagtaaggatgcctatgtacccatggcagctgggtcctggatcataggagctgtcaattctgcagtacaatcagtgtttgtggtacaattgcctttctgcaggaataacatcatcaatcatttcacctgtgaaattctggctgtcatgaaactggcctgtgctgacatctcagacaatgagttcatcatgcttgtggccacaacattgttcatattgacacctttgttattaatcattgtctcttacacgttaatcattgtgagcatcttcaaaattagctcttccgaggggagaagcaaagcttcctctacctgttcagcccatctgactgtggtcataatattctatgggaccatcctcttcatgtacatgaagcccaagtctaaagagacacttaattcggatgacttggatgctaccgacaaaattatatccatgttctatggggtgatgactcccatgatgaatcctttaatctacagtcttaggaacaaagaagttaaaaaggccataaagaggttgttcaagagaaagtgctgcaggagaaggtgagcggccgc

SEQ ID NO: 717 - DNA, 1130 bp, synthetic construct
  source 1..1130: mol_type = other DNA; note = mmLucy-FLAG-rho-OR13C3
ggatccgccaccatgagccaccagatcctgctgctcctggccctgctgaccctaggcctggctgattacaaggacgacgacgataagatcgaattgatgaacgggaccgagggcccaaacttctacgtgcctttctccaacaagacgggcgtggtggaattcatgggtgagattaaccagacacttgtgtcagaatttcttcttctgggtctttctggatacccaaagattgagattgtttactttgctctcattctagttatgtacctagtgattctaattggcaatggtgttctaatcatagccagcatctttgattctcattttcacacaccaatgtacttcttcctgggcaacctctctttcctggatatctgctatacatcctcctctgttccctcaacattggtgagcttaatctcaaagaaaagaaacatttccttctctggatgtgcagtgcagatgttctttgggtttgcaatggggtcaacagaatgtctgcttcttggcatgatggcatttgatcgttatgtggccatctgcaacccactgagataccccatcatcctgagcaaggtggcgtatgtattgatggcttctgtgtcctggctgtccggtggaataaattcagctgtgcaaacattacttgccatgagactgcctttctgtgggaataatattatcaatcatttcgcatgtgaaatattagctgtcctcaagctggcctgtgctgatatatccctcaatattatcaccatggtgatatcaaatatggccttcctggttcttccactgatggtcatttttttctcctatatgttcatcctctacaccatcttgcaaatgaattcagccacaggaagacgcaaggcattttccacgtgctcagctcacctgactgtggtgatcatattttacggtaccatcttctttatgtatgcgaaaccgaagtctcaagacctgattggggaagaaaaattgcaagcattagacaagctcatttctctgttttatggggtagtgacacccatgctgaatcctatactctatagcttgaggaacaaagaagttaaaaaggccataaagaggttgttcaagagaaagtgctgcaggagaaggtgagcggccgc

SEQ ID NO: 718 - DNA, 1130 bp, synthetic construct
  source 1..1130: mol_type = other DNA; note = mmLucy-FLAG-rho-OR13C4
ggatccgccaccatgagccaccagatcctgctgctcctggccctgctgaccctaggcctggctgattacaaggacgacgacgataagatcgaattgatgaacgggaccgagggcccaaacttctacgtgcctttctccaacaagacgggcgtggtggaattcatggacaagataaaccagacatttgtgagagaattcattcttctgggactctctggttaccccaaacttgagatcattttctttgctctgattctagttatgtacgtagtgattctaattggcaatggtgttctgatcatagcaagcatcttggattctcgtcttcacatgcccatgtacttcttcctgggcaacctctctttcctggatatctgctatacaacctcctccattccctcaacactggtgagcttaatctcaaagaaaagaaacatttccttctctggatgtgcagtgcagatgttctttgggtttgcaatggggtcaacagaatgtttcctccttggcatgatggcatttgatcgttatgtggccatctgtaaccctctgagataccccatcatcatgaacaaggtggtgtatgtactgctgacttctgtatcatggctttctggtggaatcaattcaactgtgcaaacatcacttgccatgcgatggcctttctgtgggaacaatattattaatcatttcttatgcgagatcttagctgtcctaaaattagcttgttctgatatatctgtcaatattgttaccctagcagtgtcaaatattgctttcctagttcttcctctgctcgtgatttttttctcctatatgttcatcctctacaccatcttgcgaacgaactcggccacaggaagacacaaggcattttctacatgctcagctcacctgactgtggtgatcatattttatggtaccatcttctttatgtatgcaaaacctaagtcccaggacctccttgggaaagacaacttgcaagctacagaggggcttgtttccatgttttatggggttgtgacccccatgttaaaccccataatctatagcttgaggaacaaagaagttaaaaaggccataaagaggttgttcaagagaaagtgctgcaggagaaggtgagcggccgc

SEQ ID NO: 719 - DNA, 1130 bp, synthetic construct
  source 1..1130: mol_type = other DNA; note = mmLucy-FLAG-rho-OR13C5
ggatccgccaccatgagccaccagatcctgctgctcctggccctgctgaccctaggcctggctgattacaaggacgacgacgataagatcgaattgatgaacgggaccgagggcccaaacttctacgtgcctttctccaacaagacgggcgtggtggaattcatggaatgggaaaaccacaccattctggtggaattttttctgaagggactttctggtcacccaagacttgagttactcttttttgtgctcatcttcataatgtatgtggtcatccttctggggaatggtactctcattttaatcagcatcttggaccctcaccttcacacccctatgtacttctttctggggaacctctccttcttggacatctgctacaccaccacctctattccctccacgctagtgagcttcctttcagaaagaaagaccatttccctttctggctgtgcagtgcagatgttcctcagcttggccatggggacaacagagtgtgtgcttctgggcgtgatggcctttgaccgctatgtggctatctgcaaccctctgagatatcccatcatcatgagtaaggatgcctatgtacccatggcagctgggtcctggatcataggagctgtcaattctgcagtacaaacagtgtttgtggtacaattgcctttctgcaggaataacatcatcaatcatttcacctgtgaaattctagctgtcatgaaactggcctgtgctgacatctcaggcaatgagttcatcctgcttgtgaccacaacattgttcctattgacacctttgttattaattattgtctcttacacgttaatcattttgagcatcttcaaaattagctcttcggaggggagaagcaaaccttcctctacctgctcagctcgtctgactgtggtgataacattctgtgggaccatcttcctcatgtacatgaagcccaagtctcaagagacacttaattcagatgacttggatgccactgacaaacttatattcatattctacagggtgatgactcccatgatgaatcctttaatctacagtcttaggaacaaagaagttaaaaaggccataaagaggttgttcaagagaaagtgctgcaggagaaggtgagcggccgc

SEQ ID NO: 720 - DNA, 1130 bp, synthetic construct
  source 1..1130: mol_type = other DNA; note = mmLucy-FLAG-rho-OR13C5(V117M,C189Y,M258T,I282V,M290T)
ggatccgccaccatgagccaccagatcctgctgctcctggccctgctgaccctaggcctggctgattacaaggacgacgacgataagatcgaattgatgaacgggaccgagggcccaaacttctacgtgcctttctccaacaagacgggcgtggtggaattcatggaatgggaaaaccacaccattctggtggaattttttctgaagggactttctggtcacccaagacttgagttactcttttttgtgctcatcttcataatgtatgtggtcatccttctggggaatggtactctcattttaatcagcatcttggaccctcaccttcacacccctatgtacttctttctggggaacctctccttcttggacatctgctacaccaccacctctattccctccacgctagtgagcttcctttcagaaagaaagaccatttccctttctggctgtgcagtgcagatgttcctcagcttggccatggggacaacagagtgtgtgcttctgggcatgatggcctttgaccgctatgtggctatctgcaaccctctgagatatcccatcatcatgagtaaggatgcctatgtacccatggcagctgggtcctggatcataggagctgtcaattctgcagtacaaacagtgtttgtggtacaattgcctttctgcaggaataacatcatcaatcatttcacctgtgaaattctagctgtcatgaaactggcctatgctgacatctcaggcaatgagttcatcctgcttgtgaccacaacattgttcctattgacacctttgttattaattattgtctcttacacgttaatcattttgagcatcttcaaaattagctcttcggaggggagaagcaaaccttcctctacctgctcagctcgtctgactgtggtgataacattctgtgggaccatcttcctcacgtacatgaagcccaagtctcaagagacacttaattcagatgacttggatgccactgacaaacttatattcgtattctacagggtgatgactcccacgatgaatcctttaatctacagtcttaggaacaaagaagttaaaaaggccataaagaggttgttcaagagaaagtgctgcaggagaaggtgagcggccgc

SEQ ID NO: 721 - DNA, 1130 bp, synthetic construct
  source 1..1130: mol_type = other DNA; note = mmLucy-FLAG-rho-OR13C8
ggatccgccaccatgagccaccagatcctgctgctcctggccctgctgaccctaggcctggctgattacaaggacgacgacgataagatcgaattgatgaacgggaccgagggcccaaacttctacgtgcctttctccaacaagacgggcgtggtggaattcatggaaaggaccaacgattccacgtcgacagaatttttcctggtagggctttctgcccacccaaagctccagacagttttcttcgttctaattttgtggatgtacctgatgatcctgcttggaaatggagtccttatctcagttatcatctttgattctcacctgcacacccccatgtatttcttcctctgtaatctttccttcctcgacgtttgctacacaagttcctctgtcccactaattcttgccagctttctggcagtaaagaaaaaggtttccttctctgggtgtatggtgcaaatgtttatttcttttgccatgggggccacggagtgcatgatcttaggcacgatggcactggaccgctatgtggccatctgctacccactgagataccctgtcatcatgagcaagggtgcctatgtggccatggcagctgggtcctgggtcactgggcttgtggactcagtagtgcagacagcttttgcaatgcagttaccattctgtgctaataatgtcattaaacattttgtctgtgaaattctggctatcttgaaactggcctgtgctgatatttcaatcaatgtgattagtatgacagggtcgaatctgattgttctggttattccattgttagtaatttccatctcttacatatttattgttgccactattctgaggattccttccactgaaggaaaacataaggccttctccacctgctcagcccacctgacagtggtgattatattctatggaaccatcttcttcatgtacgcaaagcctgagtctaaagcctctgttgattcaggtaatgaagacatcattgaggccctcatctcccttttctatggagtgatgactcccatgcttaatcctctcatctatagtctgaggaacaaagaagttaaaaaggccataaagaggttgttcaagagaaagtgctgcaggagaaggtgagcggccgc

SEQ ID NO: 722 - DNA, 1130 bp, synthetic construct
  source 1..1130: mol_type = other DNA; note = mmLucy-FLAG-rho-OR13C8(A19D)
ggatccgccaccatgagccaccagatcctgctgctcctggccctgctgaccctaggcctggctgattacaaggacgacgacgataagatcgaattgatgaacgggaccgagggcccaaacttctacgtgcctttctccaacaagacgggcgtggtggaattcatggaaaggaccaacgattccacgtcgacagaatttttcctggtagggctttctgaccacccaaagctccagacagttttcttcgttctaattttgtggatgtacctgatgatcctgcttggaaatggagtccttatctcagttatcatctttgattctcacctgcacacccccatgtatttcttcctctgtaatctttccttcctcgacgtttgctacacaagttcctctgtcccactaattcttgccagctttctggcagtaaagaaaaaggtttccttctctgggtgtatggtgcaaatgtttatttcttttgccatgggggccacggagtgcatgatcttaggcacgatggcactggaccgctatgtggccatctgctacccactgagataccctgtcatcatgagcaagggtgcctatgtggccatggcagctgggtcctgggtcactgggcttgtggactcagtagtgcagacagcttttgcaatgcagttaccattctgtgctaataatgtcattaaacattttgtctgtgaaattctggctatcttgaaactggcctgtgctgatatttcaatcaatgtgattagtatgacagggtcgaatctgattgttctggttattccattgttagtaatttccatctcttacatatttattgttgccactattctgaggattccttccactgaaggaaaacataaggccttctccacctgctcagcccacctgacagtggtgattatattctatggaaccatcttcttcatgtacgcaaagcctgagtctaaagcctctgttgattcaggtaatgaagacatcattgaggccctcatctcccttttctatggagtgatgactcccatgcttaatcctctcatctatagtctgaggaacaaagaagttaaaaaggccataaagaggttgttcaagagaaagtgctgcaggagaaggtgagcggccgc

SEQ ID NO: 723 - DNA, 1130 bp, synthetic construct
  source 1..1130: mol_type = other DNA; note = mmLucy-FLAG-rho-OR13C9
ggatccgccaccatgagccaccagatcctgctgctcctggccctgctgaccctaggcctggctgattacaaggacgacgacgataagatcgaattgatgaacgggaccgagggcccaaacttctacgtgcctttctccaacaagacgggcgtggtggaattcatggaatgggaaaaccaaaccattctggtggaattttttctgaagggacattctgttcacccaaggcttgagttactcttttttgtgctaatcttcataatgtatgtggtcatccttctggggaatggtactctcattttaatcagcatcttggaccctcaccttcacacccctatgtacttctttctggggaacctctccttcttggacatctgctacaccaccacctctattccctccacactagtgagcttcctttcagaaagaaagaccatttccttttctggctgtgcagtgcagatgttccttggcttggccatggggacaacagagtgtgtgcttctgggcatgatggcctttgaccgctatgtggctatctgcaaccctctgagatatcccatcatcatgagcaagaatgcctatgtacccatggctgttgggtcctggtttgcagggattgtcaactctgcagtacaaactacatttgtagtacaattgcctttctgcaggaagaatgtcatcaatcatttctcatgtgaaattctagctgtcatgaagttggcctgtgctgacatctcaggcaatgagttcctcatgcttgtggccacaatattgttcacattgatgccactgctcttgatagttatctcttactcattaatcatttccagcatcctcaagattcactcctctgaggggagaagcaaagctttctctacctgctcagcccatctgactgtggtcataatattctatgggaccatcctcttcatgtatatgaagcccaagtctaaagagacacttaattcagatgacttggatgctaccgacaaaattatatccatgttctatggggtgatgactcccatgatgaatcctttaatctacagtcttaggaacaaagaagttaaaaaggccataaagaggttgttcaagagaaagtgctgcaggagaaggtgagcggccgc

SEQ ID NO: 724 - DNA, 1130 bp, synthetic construct
  source 1..1130: mol_type = other DNA; note = mmLucy-FLAG-rho-OR13C9(E24D,T91S)
ggatccgccaccatgagccaccagatcctgctgctcctggccctgctgaccctaggcctggctgattacaaggacgacgacgataagatcgaattgatgaacgggaccgagggcccaaacttctacgtgcctttctccaacaagacgggcgtggtggaattcatggaatgggaaaaccaaaccattctggtggaattttttctgaagggacattctgttcacccaaggcttgacttactcttttttgtgctaatcttcataatgtatgtggtcatccttctggggaatggtactctcattttaatcagcatcttggaccctcaccttcacacccctatgtacttctttctggggaacctctccttcttggacatctgctacaccaccacctctattccctccacactagtgagcttcctttcagaaagaaagagcatttccttttctggctgtgcagtgcagatgttccttggcttggccatggggacaacagagtgtgtgcttctgggcatgatggcctttgaccgctatgtggctatctgcaaccctctgagatatcccatcatcatgagcaagaatgcctatgtacccatggctgttgggtcctggtttgcagggattgtcaactctgcagtacaaactacatttgtagtacaattgcctttctgcaggaagaatgtcatcaatcatttctcatgtgaaattctagctgtcatgaagttggcctgtgctgacatctcaggcaatgagttcctcatgcttgtggccacaatattgttcacattgatgccactgctcttgatagttatctcttactcattaatcatttccagcatcctcaagattcactcctctgaggggagaagcaaagctttctctacctgctcagcccatctgactgtggtcataatattctatgggaccatcctcttcatgtatatgaagcccaagtctaaagagacacttaattcagatgacttggatgctaccgacaaaattatatccatgttctatggggtgatgactcccatgatgaatcctttaatctacagtcttaggaacaaagaagttaaaaaggccataaagaggttgttcaagagaaagtgctgcaggagaaggtgagcggccgc

SEQ ID NO: 725 - DNA, 1112 bp, synthetic construct
  source 1..1112: mol_type = other DNA; note = mmLucy-FLAG-rho-OR13D1
ggatccgccaccatgagccaccagatcctgctgctcctggccctgctgaccctaggcctggctgattacaaggacgacgacgataagatcgaattgatgaacgggaccgagggcccaaacttctacgtgcctttctccaacaagacgggcgtggtggaattcatggagacaagaaattactctgccatgactgaattctttctggtggggctttcccaatatccagagctccagctttttctgttcctgctctgcctcatcatgtacatgataatcctcctgggaaatagcctcctcattatcatcaccatcttggattctcgcctccatactcccatgtatttctttcttggaaacctctcattcttggacatctgttacacatcctcatccattcctccaatgcttattatatttatgtctgagagaaaatccatctccttcattggctgtgctctgcagatggttgtgtcccttggcttgggctccactgagtgtgtcctcctggctgtgatggcctatgaccactatgtggccatctgcaacccactgaggtactccatcatcatgaacggagtgctgtatgtgcaaatggctgcatggtcctggatcataggctgtctgacctccctattgcaaacagttctgacaatgatgttgcctttctgtgggaataatgtcattgatcatattacctgtgaaattttggcccttctaaaacttgtttgttcagatatcaccatcaatgtgcttatcatgacagtgacaaatattgtttcactggtgattcttctactgttaattttcatctcctatgtgtttattctctcttccatcctgagaattaattgtgctgagggaagaaagaaagccttctctacctgttcagcgcactcgattgtggtcatcttattctacggttcagccctttttatgtacatgaaacccaagtcaaagaacactaatacatctgatgagattattgggctgtcttatggagtggtaagcccaatgttaaatcccatcatctatagcctcaggaacaaagaagttaaaaaggccataaagaggttgttcaagagaaagtgctgcaggagaaggtgagcggccgc

SEQ ID NO: 726 - DNA, 1112 bp, synthetic construct
  source 1..1112: mol_type = other DNA; note = mmLucy-FLAG-rho-OR13D1(Q159H,S245L)
ggatccgccaccatgagccaccagatcctgctgctcctggccctgctgaccctaggcctggctgattacaaggacgacgacgataagatcgaattgatgaacgggaccgagggcccaaacttctacgtgcctttctccaacaagacgggcgtggtggaattcatggagacaagaaattactctgccatgactgaattctttctggtggggctttcccaatatccagagctccagctttttctgttcctgctctgcctcatcatgtacatgataatcctcctgggaaatagcctcctcattatcatcaccatcttggattctcgcctccatactcccatgtatttctttcttggaaacctctcattcttggacatctgttacacatcctcatccattcctccaatgcttattatatttatgtctgagagaaaatccatctccttcattggctgtgctctgcagatggttgtgtcccttggcttgggctccactgagtgtgtcctcctggctgtgatggcctatgaccactatgtggccatctgcaacccactgaggtactccatcatcatgaacggagtgctgtatgtgcaaatggctgcatggtcctggatcataggctgtctgacctccctattgcacacagttctgacaatgatgttgcctttctgtgggaataatgtcattgatcatattacctgtgaaattttggcccttctaaaacttgtttgttcagatatcaccatcaatgtgcttatcatgacagtgacaaatattgtttcactggtgattcttctactgttaattttcatctcctatgtgtttattctctcttccatcctgagaattaattgtgctgagggaagaaagaaagccttctctacctgttcagcgcacttgattgtggtcatcttattctacggttcagccctttttatgtacatgaaacccaagtcaaagaacactaatacatctgatgagattattgggctgtcttatggagtggtaagcccaatgttaaatcccatcatctatagcctcaggaacaaagaagttaaaaaggccataaagaggttgttcaagagaaagtgctgcaggagaaggtgagcggccgc

SEQ ID NO: 727 - DNA, 1112 bp, synthetic construct
  source 1..1112: mol_type = other DNA; note = mmLucy-FLAG-rho-OR13F1(F18S,M101V,V134I,T254M)
ggatccgccaccatgagccaccagatcctgctgctcctggccctgctgaccctaggcctggctgattacaaggacgacgacgataagatcgaattgatgaacgggaccgagggcccaaacttctacgtgcctttctccaacaagacgggcgtggtggaattcatgttcccggcaaattggacatctgtaaaagtatttttcttcctgggattttctcactaccccaaagttcaggtcatcatatttgcggtgtgcttgctgatgtacctgatcaccttgctgggcaacatttttctgatctccatcaccattctagattcccacctgcacacccctatgtacctcttcctcagcaatctctcctttctggacatctggtactcctcttctgccctctctccaatgctggcaaactttgtttcagggagaaacactatttcattctcagggtgcgccactcaggtgtacctctcccttgccatgggctccactgagtgtgtgctcctgcccatgatggcatatgaccggtatgtggccatctgcaaccccctgagataccctatcatcatgaataggagaacctgtgtgcagattgcagctggctcctggatgacaggctgtctcactgccatggtggaaatgatgtctgtgctgccactgtctctctgtggtaatagcatcatcaatcatttcacttgtgaaattctggccatcttgaaattggtttgtgtggacacctccctggtgcagttaatcatgctggtgatcagtgtacttcttctccccatgccaatgctactcatttgtatctcttatgcatttatcctcgccagtatcctgagaatcagctcagtggaaggtcgaagtaaagccttttcaacgtgcacagcccacctgatggtggtagttttgttctatgggatggctctctccatgcacctgaagccctccgctgtagattcacaggaaatagacaaatttatggctttggtgtatgccggacaaacccccatgttgaatcctatcatctatagtctaaggaacaaagaagttaaaaaggccataaagaggttgttcaagagaaagtgctgcaggagaaggtgagcggccgc

SEQ ID NO: 728 - DNA, 1103 bp, synthetic construct
  source 1..1103: mol_type = other DNA; note = mmLucy-FLAG-rho-OR13G1(I132V)
ggatccgccaccatgagccaccagatcctgctgctcctggccctgctgaccctaggcctggctgattacaaggacgacgacgataagatcgaattgatgaacgggaccgagggcccaaacttctacgtgcctttctccaacaagacgggcgtggtggaattcatgaatcacagcgttgtaactgagttcattattctgggcctcaccaaaaagcctgaactccagggaattatcttcctcttttttctcattgtctatcttgtggcttttctcggcaacatgctcatcatcattgccaaaatctataacaacaccttgcatacgcccatgtatgttttccttctgacactggctgttgtggacatcatctgcacaacaagcatcataccgaagatgctggggaccatgctaacatcagaaaataccatttcatatgcaggctgcatgtcccagctcttcttgttcacatggtctctgggagctgagatggttctcttcaccaccatggcctatgaccgctatgtggccatttgtttccctcttcattacagtactgttatgaaccaccatatgtgtgtagccttgctcagcatggtcatggctattgcagtcaccaattcctgggtgcacacagctcttatcatgaggttgactttctgtgggccaaacaccattgaccacttcttctgtgagatacccccattgctggctttgtcctgtagccctgtaagaatcaatgaggtgatggtgtatgttgctgatattaccctggccataggggactttattcttacctgcatctcctatggttttatcattgttgctattctccgtatccgcacagtagaaggcaagaggaaggccttctcaacatgctcatctcatctcacagtggtgaccctttactattctcctgtaatctacacctatatccgccctgcttccagctatacatttgaaagagacaaggtggtagctgcactctatactcttgtgactcccacattaaacccgatggtgtacagcttcaggaacaaagaagttaaaaaggccataaagaggttgttcaagagaaagtgctgcaggagaaggtgagcggccgc

SEQ ID NO: 729 - DNA, 1103 bp, synthetic construct
  source 1..1103: mol_type = other DNA; note = mmLucy-FLAG-rho-OR13G1(K46I,M146L,R224C)
ggatccgccaccatgagccaccagatcctgctgctcctggccctgctgaccctaggcctggctgattacaaggacgacgacgataagatcgaattgatgaacgggaccgagggcccaaacttctacgtgcctttctccaacaagacgggcgtggtggaattcatgaatcacagcgttgtaactgagttcattattctgggcctcaccaaaaagcctgaactccagggaattatcttcctcttttttctcattgtctatcttgtggcttttctcggcaacatgctcatcatcattgccataatctataacaacaccttgcatacgcccatgtatgttttccttctgacactggctgttgtggacatcatctgcacaacaagcatcataccgaagatgctggggaccatgctaacatcagaaaataccatttcatatgcaggctgcatgtcccagctcttcttgttcacatggtctctgggagctgagatggttctcttcaccaccatggcctatgaccgctatgtggccatttgtttccctcttcattacagtactattatgaaccaccatatgtgtgtagccttgctcagcatggtcttggctattgcagtcaccaattcctgggtgcacacagctcttatcatgaggttgactttctgtgggccaaacaccattgaccacttcttctgtgagatacccccattgctggctttgtcctgtagccctgtaagaatcaatgaggtgatggtgtatgttgctgatattaccctggccataggggactttattcttacctgcatctcctatggttttatcattgttgctattctctgtatccgcacagtagaaggcaagaggaaggccttctcaacatgctcatctcatctcacagtggtgaccctttactattctcctgtaatctacacctatatccgccctgcttccagctatacatttgaaagagacaaggtggtagctgcactctatactcttgtgactcccacattaaacccgatggtgtacagcttcaggaacaaagaagttaaaaaggccataaagaggttgttcaagagaaagtgctgcaggagaaggtgagcggccgc

SEQ ID NO: 730 - DNA, 1109 bp, synthetic construct
  source 1..1109: mol_type = other DNA; note = mmLucy-FLAG-rho-OR13H1
ggatccgccaccatgagccaccagatcctgctgctcctggccctgctgaccctaggcctggctgattacaaggacgacgacgataagatcgaattgatgaacgggaccgagggcccaaacttctacgtgcctttctccaacaagacgggcgtggtggaattcatggccatggacaatgtcacagcagtgtttcagtttctccttattggcatttctaactatcctcaatggagagacacgtttttcacattagtgctgataatttacctcagcacattgttggggaatggatttatgatctttcttattcactttgaccccaacctccacactccaatctacttcttccttagtaacctgtctttcttagacctttgttatggaacagcttccatgccccaggctttggtgcattgtttctctacccatccctacctctcttatccccgatgtttggctcaaacgagtgtctccttggctttggccacagcagagtgcctcctactggctgccatggcctatgaccgtgtggttgctatcagcaatcccctgcgttattcagtggttatgaatggcccagtatgtgtctgcttggttgctacctcatgggggacatcacttgtgctcactgccatgctcatcctatccctgaggcttcacttctgtggggctaatgtcatcaaccattttgcctgtgagattctctccctcattaagctgacctgttctgataccagcctcaatgaatttatgatcctcatcaccagtatcttcaccctgctgctaccatttgggtttgttctcctctcctacatacgaattgctatggctatcataaggattcgctcactccagggcaggctcaaggcctttaccacatgtggctctcacctgaccgtggtgacaatcttctatgggtcagccatctccatgtatatgaaaactcagtccaagtcctaccctgaccaggacaagtttatctcagtgttttatggagctttgacacccatgttgaaccccctgatatatagcctgaggaacaaagaagttaaaaaggccataaagaggttgttcaagagaaagtgctgcaggagaaggtgagcggccgc

SEQ ID NO: 731 - DNA, 1112 bp, synthetic construct
  source 1..1112: mol_type = other DNA; note = mmLucy-FLAG-rho-OR13J1
ggatccgccaccatgagccaccagatcctgctgctcctggccctgctgaccctaggcctggctgattacaaggacgacgacgataagatcgaattgatgaacgggaccgagggcccaaacttctacgtgcctttctccaacaagacgggcgtggtggaattcatggagccgctcaacagaacagaggtgtccgagttctttctgaaaggattttctggctacccagccctggagcatctgctcttccctctgtgctcagccatgtacctggtgaccctcctggggaacacagccatcatggcggtgagcgtgctagatatccacctgcacacgcccgtgtacttcttcctgggcaacctctctaccctggacatctgctacacgcccacctttgtgcctctgatgctggtccacctcctgtcatcccggaagaccatctcctttgctgtctgtgccatccagatgtgtctgagcctgtccacgggctccacggagtgcctgctactggccatcacggcctatgaccgctacctggccatctgccagccactcaggtaccacgtgctcatgagccaccggctctgcgtgctgctgatgggagctgcctgggtcctctgcctcctcaagtcggtgactgagatggtcatctccatgaggctgcccttctgtggccaccacgtggtcagtcacttcacctgcaagatcctggcagtgctgaagctggcatgcggcaacacgtcggtcagcgaagacttcctgctggcgggctccatcctgctgctgcctgtacccctggcattcatctgcctgtcctacttgctcatcctggccaccatcctgagggtgccctcggccgccaggtgctgcaaagccttctccacctgcttggcacacctggctgtagtgctgcttttctacggcaccatcatcttcatgtacttgaagcccaagagtaaggaagcccacatctctgatgaggtcttcacagtcctctatgccatggtcacgaccatgctgaaccccaccatctacagcctgaggaacaaagaagttaaaaaggccataaagaggttgttcaagagaaagtgctgcaggagaaggtgagcggccgc

SEQ ID NO: 732 - DNA, 1112 bp, synthetic construct
  source 1..1112: mol_type = other DNA; note = mmLucy-FLAG-rho-OR13J1(H133R)
ggatccgccaccatgagccaccagatcctgctgctcctggccctgctgaccctaggcctggctgattacaaggacgacgacgataagatcgaattgatgaacgggaccgagggcccaaacttctacgtgcctttctccaacaagacgggcgtggtggaattcatggagccgctcaacagaacagaggtgtccgagttctttctgaaaggattttctggctacccagccctggagcatctgctcttccctctgtgctcagccatgtacctggtgaccctcctggggaacacagccatcatggcggtgagcgtgctagatatccacctgcacacgcccgtgtacttcttcctgggcaacctctctaccctggacatctgctacacgcccacctttgtgcctctgatgctggtccacctcctgtcatcccggaagaccatctcctttgctgtctgtgccatccagatgtgtctgagcctgtccacgggctccacggagtgcctgctactggccatcacggcctatgaccgctacctggccatctgccagccactcaggtaccgcgtgctcatgagccaccggctctgcgtgctgctgatgggagctgcctgggtcctctgcctcctcaagtcggtgactgagatggtcatctccatgaggctgcccttctgtggccaccacgtggtcagtcacttcacctgcaagatcctggcagtgctgaagctggcatgcggcaacacgtcggtcagcgaagacttcctgctggcgggctccatcctgctgctgcctgtacccctggcattcatctgcctgtcctacttgctcatcctggccaccatcctgagggtgccctcggccgccaggtgctgcaaagccttctccacctgcttggcacacctggctgtagtgctgcttttctacggcaccatcatcttcatgtacttgaagcccaagagtaaggaagcccacatctctgatgaggtcttcacagtcctctatgccatggtcacgaccatgctgaaccccaccatctacagcctgaggaacaaagaagttaaaaaggccataaagaggttgttcaagagaaagtgctgcaggagaaggtgagcggccgc

SEQ ID NO: 733 - DNA, 1103 bp, synthetic construct
  source 1..1103: mol_type = other DNA; note = mmLucy-FLAG-rho-OR14A16(I238T)
ggatccgccaccatgagccaccagatcctgctgctcctggccctgctgaccctaggcctggctgattacaaggacgacgacgataagatcgaattgatgaacgggaccgagggcccaaacttctacgtgcctttctccaacaagacgggcgtggtggaattcatggcaaatctcacaatcgtgactgaatttatccttatggggttttctaccaataaaaatatgtgcattttgcattcgattctcttcttgttgatttatttgtgtgccctgatggggaatgtcctcattatcatgatcacaactttggaccatcatctccacacccccgtgtatttcttcttgaagaatctatctttcttggatctctgccttatttcagtcacggctcccaaatctatcgccaattctttgatacacaacaactccatttcattccttggctgtgtttcccaggtctttttgttgctttcttcagcatctgcagagctgctcctcctcacggtgatgtcctttgaccgctatactgctatatgtcaccctctgcactatgatgtcatcatggacaggagcacctgtgtccaaagagccactgtgtcttggctgtatgggggtctgattgctgtgatgcacacagctggcaccttctccttatcctactgtgggtccaacatggtccatcagttcttctgtgacattccccagttattagctatttcttgctcagaaaatttaataagagaaattgcactcatccttattaatgtagttttggatttctgctgttttattgtcatcatcattacctatgtccacgtcttctctacagtcaagaagatcccttccacagaaggccagtcaaaagcctactctacttgccttccacacttgctggttgtgttatttctttccactggattcattgcttatctgaagccagcttcagagtctccttctattttggatgctgtaatttctgtgttctacactatgctgcccccaacctttaatcccattatatacagtttgaggaacaaagaagttaaaaaggccataaagaggttgttcaagagaaagtgctgcaggagaaggtgagcggccgc

SEQ ID NO: 734 - DNA, 1106 bp, synthetic construct
  source 1..1106: mol_type = other DNA; note = mmLucy-FLAG-rho-OR14A2
ggatccgccaccatgagccaccagatcctgctgctcctggccctgctgaccctaggcctggctgattacaaggacgacgacgataagatcgaattgatgaacgggaccgagggcccaaacttctacgtgcctttctccaacaagacgggcgtggtggaattcatggccaatgtcaccttggtgacaggatttcttcttatggggttttctaatatccagaagctgcggattttatatggtgtgctcttcctactgatttacctggcagccctaatgagtaaccttctcatcattactctcattaccctggacgtaaagctccaaacacccatgtacttcttcctgaagaacttatcctttttggatgtcttcctggtgtctgttccaatcccaaaattcattgtcaacaacctaacccacaacaattccatttccattctaggatgtgccttccagctacttttaatgacttccttctcagcaggagagatatttatcctcactgccatgtcctatgaccgctatgtagccatctgctgtcccctgaactacgaggtaatcatgaatactggagtctgtgtgttaatggcaagtgtttcctgggccattggagggctctttggtactgcgtacacagctggcacattttccatgcctttctgtggctccagtgtgattccacagtttttctgtgatgttccttcattactaaggatttcctgttctgaaacactaatggtaatttatgcaggtattggagttggtgcatgtttaagcatttcttgtttcatctgtattgtgatctcttacatttatatcttctccactgtactgaagatccctaccactaaaggtcagtccaaagctttttccacatgcttcccccatctcactgttttcactgtttttatcataactgcttattttgtttatcttaagccaccttcaaattcaccatctgttattgacaggctgctttctgtgatctacactgtgatgcctccagtatttaaccctgtaacctacagcctgaggaacaaagaagttaaaaaggccataaagaggttgttcaagagaaagtgctgcaggagaaggtgagcggccgc

SEQ ID NO: 735 - DNA, 1106 bp, synthetic construct
  source 1..1106: mol_type = other DNA; note = mmLucy-FLAG-rho-OR14C36
ggatccgccaccatgagccaccagatcctgctgctcctggccctgctgaccctaggcctggctgattacaaggacgacgacgataagatcgaattgatgaacgggaccgagggcccaaacttctacgtgcctttctccaacaagacgggcgtggtggaattcatgcccaattcaaccaccgtgatggaatttctcctcatgaggttttctgatgtgtggacactacagattttacattctgcatccttctttatgttgtatttggtaactctaatgggaaacatcctcattgtgaccgtcaccacctgtgacagcagccttcacatgcccatgtacttcttcctcaggaatctgtctatcttggatgcctgctacatttctgttacagtccctacctcatgtgtcaattccctactggacagcaccaccatttctaaggcgggatgtgtagctcaggtcttcctcgtggttttttttgtatatgtggagcttctgtttctcaccattatggctcatgaccgctatgtggctgtctgccagccacttcactaccctgtgatcgtgaactctcgaatctgcatccagatgacactggcctccctactcagtggtcttgtctatgcaggcatgcacactggcagcacattccagctgcccttctgtcggtccaacgttattcatcaattcttctgtgacatcccctctctgctgaagctctcttgctctgacaccttcagcaatgaggtcatgattgttgtctctgctctgggggtaggtggcggctgtttcatctttatcatcaggtcttacattcacatcttttcgaccgtgctcgggtttccaagaggagcagacagaacaaaggccttttccacctgcatccctcacatcctggtggtgtcagtcttcctcagttcatgctcttctgtgtacctcaggccacctgcgatacctgcagccacccaggatctgatcctttctggtttttattccataatgcctcccctctttaaccctattatttacagtcttaggaacaaagaagttaaaaaggccataaagaggttgttcaagagaaagtgctgcaggagaaggtgagcggccgc

SEQ ID NO: 736 - DNA, 1106 bp, synthetic construct
  source 1..1106: mol_type = other DNA; note = mmLucy-FLAG-rho-OR14C36(G225R,D231Y)
ggatccgccaccatgagccaccagatcctgctgctcctggccctgctgaccctaggcctggctgattacaaggacgacgacgataagatcgaattgatgaacgggaccgagggcccaaacttctacgtgcctttctccaacaagacgggcgtggtggaattcatgcccaattcaaccaccgtgatggaatttctcctcatgaggttttctgatgtgtggacactacagattttacattctgcatccttctttatgttgtatttggtaactctaatgggaaacatcctcattgtgaccgtcaccacctgtgacagcagccttcacatgcccatgtacttcttcctcaggaatctgtctatcttggatgcctgctacatttctgttacagtccctacctcatgtgtcaattccctactggacagcaccaccatttctaaggcgggatgtgtagctcaggtcttcctcgtggttttttttgtatatgtggagcttctgtttctcaccattatggctcatgaccgctatgtggctgtctgccagccacttcactaccctgtgatcgtgaactctcgaatctgcatccggatgacactggcctccctactcagtggtcttgtctatgcaggcatgcacactggcagcacattccagctgcccttctgtcggtccaacgttattcatcaattcttctgtgacatcccctctctgctgaagctctcttgctctgacaccttcagcaatgaggtcatgattgttgtctctgctctgggggtaggtggcggctgtttcatctttatcatcaggtcttacattcacatcttttcgaccgtgctccggtttccaagaggagcatacagaacaaaggccttttccacctgcatccctcacatcctggtggtgtcagtcttcctcagttcatgctcttctgtgtacctcaggccacctgcgatacctgcagccacccaggatctgatcctttctggtttttattccataatgcctcccctctttaaccctattatttacagtcttaggaacaaagaagttaaaaaggccataaagaggttgttcaagagaaagtgctgcaggagaaggtgagcggccgc

SEQ ID NO: 737 - DNA, 1106 bp, synthetic construct
  source 1..1106: mol_type = other DNA; note = mmLucy-FLAG-rho-OR14I1(V36A,D50N,S170N)
ggatccgccaccatgagccaccagatcctgctgctcctggccctgctgaccctaggcctggctgattacaaggacgacgacgataagatcgaattgatgaacgggaccgagggcccaaacttctacgtgcctttctccaacaagacgggcgtggtggaattcatggacaatctcacaaaagtgacagaattcctgctgatggagttttctggtatctgggagctgcaggtgctgcacgccgggctgtttctgctgatttatctggcagcgctggtggggaacctgctcatcattgcagtcatcactctcaatcagcatcttcacacacccatgtacttcttcctgaagaacctctccgttttggatctgtgctacatctcagtcactgtgcctaaatccatccgtaactccctgactcgcagaagctccatctcttatcttggctgtgtggctcaagtctattttttctctgcctttgcatctgctgagctggccttccttactgtcatgtcttatgaccgctatgttgccatttgccaccccctccaatacagagccgtgatgacatcaggagggtgctatcagatggcagtcaccacctggctaagctgcttttcctacgcagccgtccacactggcaacatgtttcgggagcacgtttgcagatccaatgtgatccaccagttcttccgtgacatccctcatgtgttggccctggtttcctgtgaggttttctttgtagagtttttgaccctggccctgagctcatgcttggttctgggatgctttattctcatgatgatctcctatttccaaatcttctcaacggtgctcagaatcccttcaggacagagtcgagcaaaagccttctccacctgctccccccagctcattgtcatcatgctctttcttaccacagggctctttgctgccttaggaccaattgcaaaagctctgtccattcaggatttagtgattgctctgacatacacagttttgcctcccttcctcaatcccatcatatatagtcttaggaacaaagaagttaaaaaggccataaagaggttgttcaagagaaagtgctgcaggagaaggtgagcggccgc

SEQ ID NO: 738 - DNA, 1106 bp, synthetic construct
  source 1..1106: mol_type = other DNA; note = mmLucy-FLAG-rho-OR14J1
ggatccgccaccatgagccaccagatcctgctgctcctggccctgctgaccctaggcctggctgattacaaggacgacgacgataagatcgaattgatgaacgggaccgagggcccaaacttctacgtgcctttctccaacaagacgggcgtggtggaattcatggtcaatttgacttcaatgagtggattccttcttatggggttttctgatgagcgtaagcttcagattttacatgcattggtatttctggtgacatacctgctggccttgacaggcaacctcctcattatcaccatcattaccgtggaccgtcgtctccattcccccatgtattactttttaaagcacctctctcttctggacctctgcttcatctctgtcacagtcccccagtccattgcaaattcacttatgggcaacggttacatttctcttgttcagtgcattcttcaggttttcttcttcatagctctggcctcatcagaagtggccattctcacagtgatgtcttatgacaggtacgcagcaatctgtcaaccacttcattatgagactattatggatccccgtgcctgtaggcatgcagtgatagctgtgtggattgctgggggcctctctgggctcatgcatgctgccattaacttctccatacctctctgtgggaagagagtcattcaccaattcttctgtgatgttcctcagatgctgaaactagcctgttcttatgaattcattaatgagattgcactggctgcattcacaacgtctgcagcatttatctgtttgatctccattgtgctctcctacattcgcatcttctctacagtgctgagaatcccatcagctgagggccggaccaaggtcttctccacctgcctaccacacctatttgtagccaccttctttctttcagctgcaggctttgagtttctcagactgccttctgattcctcatcgactgtggaccttgtattctccgtattctatactgtgatacctccaacactcaatccagtcatttatagcttaaggaacaaagaagttaaaaaggccataaagaggttgttcaagagaaagtgctgcaggagaaggtgagcggccgc

SEQ ID NO: 739 - DNA, 1106 bp, synthetic construct
  source 1..1106: mol_type = other DNA; note = mmLucy-FLAG-rho-OR14K1
ggatccgccaccatgagccaccagatcctgctgctcctggccctgctgaccctaggcctggctgattacaaggacgacgacgataagatcgaattgatgaacgggaccgagggcccaaacttctacgtgcctttctccaacaagacgggcgtggtggaattcatgaccaatcagacacagatgatggaattcttgcttgtgagatttactgagaattgggtgctcctgaggctgcatgctttgctcttctcactgatctacctcacggctgtgctgatgaatttagtcatcattctcctcatgattctggaccatcgtctccacatggcaatgtactttttcctccgacatttgtccttcttagacctgtgtctcatttctgccacagtccccaaatccatcctcaactctgtcgcctccactgactccatctccttcctggggtgtgtgttgcagctcttcttggtggtactgctggctggatcagagattggcatccttactgccatgtcctatgaccgctatgctgccatctgctgccccctacactgtgaggctgtcatgagcagagggctctgtgtccagttgatggctctgtcctggctcaacagaggggccttgggactcttgtacacagctggaacattctctctgaatttttatggctctgatgagctacatcagttcttctgcgatgtccctgccctactaaagctcacttgttctaaagaacatgccatcattagtgtcagtgtggccattggggtctgttatgcattttcatgtttagtttgcattgtagtttcctatgtgtacattttctctgctgtgttaaggatatcacagagacagagacaatccaaagccttttccaactgtgtgcctcacctcattgttgtcactgtgtttcttgtaacaggtgctgttgcttatttaaagccagggtctgatgcaccttctattctagacttgctggtgtctgtgttctattctgtcgcacctccaaccttgaaccctgttatctactgtctgaggaacaaagaagttaaaaaggccataaagaggttgttcaagagaaagtgctgcaggagaaggtgagcggccgc

SEQ ID NO: 740 - protein, 18 aa, synthetic construct
  source 1..18: note = C-terminal domain sequence
RNKQIRDALKRLLKRKCC

SEQ ID NO: 741 - protein, 21 aa, synthetic construct
  source 1..21: note = C-terminal domain sequence
RNKQIRDALKRLLKRKCCRRR

SEQ ID NO: 742 - DNA, 1121 bp, synthetic construct
  source 1..1121: mol_type = other DNA; note = OR51A2
ggatccgccaccatgagccaccagatcctgctgctcctggccctgctgaccctaggcctggctgattacaaggacgacgacgataagatcgaattgatgaacgggaccgagggcccaaacttctacgtgcctttctccaacaagacgggcgtggtggaattcatgtccattatcaacacatcatatgttgaaatcaccaccttcttcttggttgggatgccagggctagaatatgcacacatctggatctctatccccatctgcagcatgtatcttattgctattctaggaaatggcaccattctttttatcatcaagacagagccctccttgcatgggcccatgtactattttctttccatgttggctatgtcagacttgggtttgtctttatcatctctgcccactgtgttaagcatcttcctgttcaatgcccctgaaacttcttctagtgcctgctttgcccaggaattcttcattcatggattctcagtactggagtcctcagtcctcctgatcatgtcatttgatagattcctagccatccacaatcctctgagatacacctcaatcctgacaactgtcagagttgcccaaatagggatagtattctcctttaagagcatgctcctggttcttcccttccctttcactttaagaagcttgagatattgcaagaaaaaccaattatcccattcctactgtctccaccaggatgtcatgaagttggcctgttctgacaacagaattgatgttatctatggcttttttggagcactctgccttatggtagactttattctcattgctgtgtcttacaccctgatcctcaagactgtaccgggaattgcatccaaaaaggaggagcttaaggctctcaatacttgtgtttcacacatctgtgcagtgatcatcttctacctgcccatcatcaacctggccgttgtccaccgctttgccgggcatgtctctcccctcattaatgttctcatggcaaatgttctcctacttgtacctccgctgatgaaaccaattgtttattgtgtaaggaacaaacagattcgagatgccttaaagaggttgctaaagagaaagtgctgcaggagaaggtgagcggccgc

SEQ ID NO: 743 - DNA, 1121 bp, synthetic construct
  source 1..1121: mol_type = other DNA; note = OR51A2(S218F,K289N)
ggatccgccaccatgagccaccagatcctgctgctcctggccctgctgaccctaggcctggctgattacaaggacgacgacgataagatcgaattgatgaacgggaccgagggcccaaacttctacgtgcctttctccaacaagacgggcgtggtggaattcatgtccattatcaacacatcatatgttgaaatcaccaccttcttcttggttgggatgccagggctagaatatgcacacatctggatctctatccccatctgcagcatgtatcttattgctattctaggaaatggcaccattctttttatcatcaagacagagccctccttgcatgggcccatgtactattttctttccatgttggctatgtcagacttgggtttgtctttatcatctctgcccactgtgttaagcatcttcctgttcaatgcccctgaaacttcttctagtgcctgctttgcccaggaattcttcattcatggattctcagtactggagtcctcagtcctcctgatcatgtcatttgatagattcctagccatccacaatcctctgagatacacctcaatcctgacaactgtcagagttgcccaaatagggatagtattctcctttaagagcatgctcctggttcttcccttccctttcactttaagaagcttgagatattgcaagaaaaaccaattatcccattcctactgtctccaccaggatgtcatgaagttggcctgttctgacaacagaattgatgttatctatggcttttttggagcactctgccttatggtagactttattctcattgctgtgttttacaccctgatcctcaagactgtaccgggaattgcatccaaaaaggaggagcttaaggctctcaatacttgtgtttcacacatctgtgcagtgatcatcttctacctgcccatcatcaacctggccgttgtccaccgctttgccgggcatgtctctcccctcattaatgttctcatggcaaatgttctcctacttgtacctccgctgatgaatccaattgtttattgtgtaaggaacaaacagattcgagatgccttaaagaggttgctaaagagaaagtgctgcaggagaaggtgagcggccgc

SEQ ID NO: 744 - DNA, 1121 bp, synthetic construct
  source 1..1121: mol_type = other DNA; note = OR51A4(T288M)
ggatccgccaccatgagccaccagatcctgctgctcctggccctgctgaccctaggcctggctgattacaaggacgacgacgataagatcgaattgatgaacgggaccgagggcccaaacttctacgtgcctttctccaacaagacgggcgtggtggaattcatgtccattatcaacacatcatatgttgaaatcaccaccttcttcttggttgggatgccagggctagaatatgcacacatctggatctctatccccatctgcagcatgtatcttattgctattctaggaaatggcaccattctttttatcatcaagacagagccctccttgcatgagcccatgtactattttctttccatgttggctatgtcagacttgggtttgtctttatcatctctgcccactgtgttaagcatcttcctgttcaatgctcctgaaatttcatccaatgcctgctttgcccaggaattcttcattcatggattctcagtactggagtcctcagtcctcctgatcatgtcatttgatagattcctagccatccacaaccctctgagatacacctcaatcctgacaactgtcagagttgcccaaatagggatagtattctcctttaagagcatgctcctggttcttcccttccctttcactttaagaaacttgagatattgcaagaaaaaccaattatcccattcctactgtctccaccaggatgtcatgaagttggcctgttctgacaacagaattgatgttatctatggcttttttggagcactctgccttatggtagactttattctcattgctgtgtcttacaccctgatcctcaagactgtactgggaattgcatccaaaaaggagcagcttaaggctctcaatacttgtgtttcacacatctgtgcagtgatcatcttctacctgcccatcatcaacctggccgttgtccaccgctttgcccggcatgtctctcccctcattaatgttctcatggcaaatgttctcctacttgtacctccactgatgaacccaattgtttattgtgtaaggaacaaacagattcgagatgccttaaagaggttgctaaagagaaagtgctgcaggagaaggtgagcggccgc

SEQ ID NO: 745 - DNA, 1115 bp, synthetic construct
  source 1..1115: mol_type = other DNA; note = OR51A7
ggatccgccaccatgagccaccagatcctgctgctcctggccctgctgaccctaggcctggctgattacaaggacgacgacgataagatcgaattgatgaacgggaccgagggcccaaacttctacgtgcctttctccaacaagacgggcgtggtggaattcatgtctgttctcaataactccgaagtcaagcttttccttctgattgggatcccaggactggaacatgcccacatttggttctccatccccatttgcctcatgtacctgcttgccatcatgggcaactgcaccattctctttattataaagacagagccctcgcttcatgagcccatgtattatttccttgccatgttggctgtctctgacatgggcctgtccctctcctcccttcctaccatgttgagggtcttcttgttcaatgccatgggaatttcacctaatgcctgctttgctcaagaattcttcattcatggattcactgtcatggaatcctcagtacttctaattatgtctttggaccgctttcttgccattcacaatcccttaagatacagttctatcctcactagcaacagggttgctaaaatgggacttattttagccattaggagcattctcttagtgattccatttcccttcaccttaaggagattaaaatattgtcaaaagaatcttctttctcactcatactgtcttcatcaggataccatgaagctggcctgctctgacaacaagaccaatgtcatctatggcttcttcattgctctctgtactatgctggacttggcactgattgttttgtcttatgtgctgatcttgaagactatactcagcattgcatctttggcagagaggcttaaggccctaaatacctgtgtctcccacatctgtgctgtgctcaccttctatgtgcccatcatcaccctggctgccatgcatcactttgccaagcacaaaagccctcttgttgtgatccttattgcagatatgttcttgttggtgccgccccttatgaaccccattgtgtactgtgtaaggaacaaacagattcgagatgccttaaagaggttgctaaagagaaagtgctgcaggagaaggtgagcggccgc

SEQ ID NO: 746 - DNA, 1112 bp, synthetic construct
  source 1..1112: mol_type = other DNA; note = OR51B2
ggatccgccaccatgagccaccagatcctgctgctcctggccctgctgaccctaggcctggctgattacaaggacgacgacgataagatcgaattgatgaacgggaccgagggcccaaacttctacgtgcctttctccaacaagacgggcgtggtggaattcatgtggcccaatattactgcagccccttttttgctgactggctttccagggctggaggcagctcatcactggatctccatccccttctttgctgtttatgtgtgcatccttctgggcaatggcatgctcctctacctcatcaagcatgaccacagtcttcatgagcccatgtactacttcctcaccatgctggcaggcacagacctcatggtgacattgaccacgatgcctactgtaatgggcatcctatgggtgaatcacagggagattagcagtgtgggctgcttcctacaggcttactttattcactccctttctgttgtggaatcaggttccctcctggcaatggcatatgattgtttcattgccatccgcaatcctttgagatatgcttccattctcaccaatactagagtcatagcgttaggagtgggagtgtttctaaggggttttgtatccatcctgcctgtaattttgcgtcttttttcattttcatattgcaaatctcatgttatcacacgtgctttctgcctccaccaagaaatcatgagactggcttgtgctgacataactttcaatagactttaccctgtaattttgatctctttaacaatcttcctagactgtctgatcatcctcttctcctatattctaattcttaatactgtcataggcattgcttctggtgaagagagagccaaagccctcaatacctgtatctcccacattagttgtgttcttatcttctatgttacagtgatgggtttgacattcatttacagatttgggaagaatgtgccagaggttgtccacattatcatgagttacatctacttcctctttcctcctttaatgaaccctgtcatctacagcatcaggaacaaacagattcgagatgccttaaagaggttgctaaagagaaagtgctgcaggagaaggtgagcggccgc

SEQ ID NO: 747 - DNA, 1112 bp, synthetic construct
  source 1..1112: mol_type = other DNA; note = OR51B2(C120R,C209S,P283S)
ggatccgccaccatgagccaccagatcctgctgctcctggccctgctgaccctaggcctggctgattacaaggacgacgacgataagatcgaattgatgaacgggaccgagggcccaaacttctacgtgcctttctccaacaagacgggcgtggtggaattcatgtggcccaatattactgcagccccttttttgctgactggctttccagggctggaggcagctcatcactggatctccatccccttctttgctgtttatgtgtgcatccttctgggcaatggcatgctcctctacctcatcaagcatgaccacagtcttcatgagcccatgtactacttcctcaccatgctggcaggcacagacctcatggtgacattgaccacgatgcctactgtaatgggcatcctatgggtgaatcacagggagattagcagtgtgggctgcttcctacaggcttactttattcactccctttctgttgtggaatcaggttccctcctggcaatggcatatgatcgtttcattgccatccgcaatcctttgagatatgcttccattctcaccaatactagagtcatagcgttaggagtgggagtgtttctaaggggttttgtatccatcctgcctgtaattttgcgtcttttttcattttcatattgcaaatctcatgttatcacacgtgctttctgcctccaccaagaaatcatgagactggcttgtgctgacataactttcaatagactttaccctgtaattttgatctctttaacaatcttcctagactctctgatcatcctcttctcctatattctaattcttaatactgtcataggcattgcttctggtgaagagagagccaaagccctcaatacctgtatctcccacattagttgtgttcttatcttctatgttacagtgatgggtttgacattcatttacagatttgggaagaatgtgccagaggttgtccacattatcatgagttacatctacttcctctttccttctttaatgaaccctgtcatctacagcatcaggaacaaacagattcgagatgccttaaagaggttgctaaagagaaagtgctgcaggagaaggtgagcggccgc

SEQ ID NO: 748 - DNA, 1112 bp, synthetic construct
  source 1..1112: mol_type = other DNA; note = OR51B2(C120R,L134F,C209S)
ggatccgccaccatgagccaccagatcctgctgctcctggccctgctgaccctaggcctggctgattacaaggacgacgacgataagatcgaattgatgaacgggaccgagggcccaaacttctacgtgcctttctccaacaagacgggcgtggtggaattcatgtggcccaatattactgcagccccttttttgctgactggctttccagggctggaggcagctcatcactggatctccatccccttctttgctgtttatgtgtgcatccttctgggcaatggcatgctcctctacctcatcaagcatgaccacagtcttcatgagcccatgtactacttcctcaccatgctggcaggcacagacctcatggtgacattgaccacgatgcctactgtaatgggcatcctatgggtgaatcacagggagattagcagtgtgggctgcttcctacaggcttactttattcactccctttctgttgtggaatcaggttccctcctggcaatggcatatgatcgtttcattgccatccgcaatcctttgagatatgcttccattttcaccaatactagagtcatagcgttaggagtgggagtgtttctaaggggttttgtatccatcctgcctgtaattttgcgtcttttttcattttcatattgcaaatctcatgttatcacacgtgctttctgcctccaccaagaaatcatgagactggcttgtgctgacataactttcaatagactttaccctgtaattttgatctctttaacaatcttcctagactctctgatcatcctcttctcctatattctaattcttaatactgtcataggcattgcttctggtgaagagagagccaaagccctcaatacctgtatctcccacattagttgtgttcttatcttctatgttacagtgatgggtttgacattcatttacagatttgggaagaatgtgccagaggttgtccacattatcatgagttacatctacttcctctttcctcctttaatgaaccctgtcatctacagcatcaggaacaaacagattcgagatgccttaaagaggttgctaaagagaaagtgctgcaggagaaggtgagcggccgc

SEQ ID NO: 749 - DNA, 1109 bp, synthetic construct
  source 1..1109: mol_type = other DNA; note = OR51B4
ggatccgccaccatgagccaccagatcctgctgctcctggccctgctgaccctaggcctggctgattacaaggacgacgacgataagatcgaattgatgaacgggaccgagggcccaaacttctacgtgcctttctccaacaagacgggcgtggtggaattcatgtggtataacaacagtgctggccccttcttgctgactggcttcttgggctcagaggcagttcactaccggatctctatgtccttctttgtcatctacttctccgtcctttttggaaatggcactcttcttgtcctcatttggaatgatcacagcctccatgagcccatgtactacttcctggctatgctggcagacacggaccttgggatgacattcactacaatgcccacagtcctgggtgtcctgctgctagaccagagggagattgcccatgctgcctgtttcacccaatccttcattcattcactggccattgtagaatcaggtatcttgcttgttttggcctatgactgtttcattgccatccgcacaccactgaggtacaactgcattcttaccaattcccgagtgatgaacataggactgggggtactgatgagaggttttatgtccattttgcccataattctttcactctactgctacccatattgtggttcccgtgccctcttgcacacattttgcctccatcaagatgtcataaaactcgcctgtgctgatatcacgtttaatcacatatatccaattattcagacttctttgactgtctttttagatgctctaatcatcatcttttcttatatactaatcctcaagacagtgatgggcattgcgtctggacaagaggaagctaaatctctcaacacttgtgtctcccatattagctgtgtcctagtatttcacatcactgtgatgggactgtcattcattcacaggtttgggaaacatgcacctcatgtggtccccattaccatgagctatgtccattttctctttcctccattcgtgaatcctatcatttatagcatcaggaacaaacagattcgagatgccttaaagaggttgctaaagagaaagtgctgcaggagaaggtgagcggccgc

SEQ ID NO: 750 - DNA, 1109 bp, synthetic construct
  source 1..1109: mol_type = other DNA; note = OR51B4(V36I)
ggatccgccaccatgagccaccagatcctgctgctcctggccctgctgaccctaggcctggctgattacaaggacgacgacgataagatcgaattgatgaacgggaccgagggcccaaacttctacgtgcctttctccaacaagacgggcgtggtggaattcatgtggtataacaacagtgctggccccttcttgctgactggcttcttgggctcagaggcagttcactaccggatctctatgtccttctttgtcatctacttctccatcctttttggaaatggcactcttcttgtcctcatttggaatgatcacagcctccatgagcccatgtactacttcctggctatgctggcagacacggaccttgggatgacattcactacaatgcccacagtcctgggtgtcctgctgctagaccagagggagattgcccatgctgcctgtttcacccaatccttcattcattcactggccattgtagaatcaggtatcttgcttgttttggcctatgactgtttcattgccatccgcacaccactgaggtacaactgcattcttaccaattcccgagtgatgaacataggactgggggtactgatgagaggttttatgtccattttgcccataattctttcactctactgctacccatattgtggttcccgtgccctcttgcacacattttgcctccatcaagatgtcataaaactcgcctgtgctgatatcacgtttaatcacatatatccaattattcagacttctttgactgtctttttagatgctctaatcatcatcttttcttatatactaatcctcaagacagtgatgggcattgcgtctggacaagaggaagctaaatctctcaacacttgtgtctcccatattagctgtgtcctagtatttcacatcactgtgatgggactgtcattcattcacaggtttgggaaacatgcacctcatgtggtccccattaccatgagctatgtccattttctctttcctccattcgtgaatcctatcatttatagcatcaggaacaaacagattcgagatgccttaaagaggttgctaaagagaaagtgctgcaggagaaggtgagcggccgc

SEQ ID NO: 751 - DNA, 1109 bp, synthetic construct
  source 1..1109: mol_type = other DNA; note = OR51B4(V36I,M147T)
ggatccgccaccatgagccaccagatcctgctgctcctggccctgctgaccctaggcctggctgattacaaggacgacgacgataagatcgaattgatgaacgggaccgagggcccaaacttctacgtgcctttctccaacaagacgggcgtggtggaattcatgtggtataacaacagtgctggccccttcttgctgactggcttcttgggctcagaggcagttcactaccggatctctatgtccttctttgtcatctacttctccatcctttttggaaatggcactcttcttgtcctcatttggaatgatcacagcctccatgagcccatgtactacttcctggctatgctggcagacacggaccttgggatgacattcactacaatgcccacagtcctgggtgtcctgctgctagaccagagggagattgcccatgctgcctgtttcacccaatccttcattcattcactggccattgtagaatcaggtatcttgcttgttttggcctatgactgtttcattgccatccgcacaccactgaggtacaactgcattcttaccaattcccgagtgatgaacataggactgggggtactgacgagaggttttatgtccattttgcccataattctttcactctactgctacccatattgtggttcccgtgccctcttgcacacattttgcctccatcaagatgtcataaaactcgcctgtgctgatatcacgtttaatcacatatatccaattattcagacttctttgactgtctttttagatgctctaatcatcatcttttcttatatactaatcctcaagacagtgatgggcattgcgtctggacaagaggaagctaaatctctcaacacttgtgtctcccatattagctgtgtcctagtatttcacatcactgtgatgggactgtcattcattcacaggtttgggaaacatgcacctcatgtggtccccattaccatgagctatgtccattttctctttcctccattcgtgaatcctatcatttatagcatcaggaacaaacagattcgagatgccttaaagaggttgctaaagagaaagtgctgcaggagaaggtgagcggccgc

SEQ ID NO: 752 - DNA, 1112 bp, synthetic construct
  source 1..1112: mol_type = other DNA; note = OR51B5
ggatccgccaccatgagccaccagatcctgctgctcctggccctgctgaccctaggcctggctgattacaaggacgacgacgataagatcgaattgatgaacgggaccgagggcccaaacttctacgtgcctttctccaacaagacgggcgtggtggaattcatgtcgtccagcggcagctcccatcccttcctattgactggttttccaggcttggaggaagctcatcactggatttccgtatttttcttgttcatgtatatatccatcctttttggcaatggcaccctccttcttctcattaaggaagatcacaatcttcatgagcccatgtacttctttctggccatgctggctgccacagacctggggctggccctgaccacaatgcccacggtgctgggagtcctctggctggatcacagggagattggaagtgcggcctgcttttcccaggcctactttatacactcactttcctttctcgagtctggcattctgcttgccatggcctatgaccgttttattgccatctgcaaccctcttagatatacctctgtacttactaatactcgagtagtgaagattgggctgggagttctgatgaggggatttgtatccgttgttcccccaatcaggcccctctatttttttctgtattgtcactcccatgttctttcacatgcattctgccttcaccaggatgtcattaaactcgcctgtgctgataccaccttcaaccgactgtacccagctgtgcttgtagtctttatatttgtgctggattatctgattatcttcatctcctatgtgttgatactcaagactgtcctgagcattgcctccagagaggagagggccaaggctctcattacctgtgtctcccatatctgctgtgtcctggttttttatgtcacagtgattggattgtctctgattcatcgttttggaaagcaggttccacatattgttcacctcattatgagctatgcctattttctgttccctccactaatgaatcctataacatatagtgtcaggaacaaacagattcgagatgccttaaagaggttgctaaagagaaagtgctgcaggagaaggtgagcggccgc

SEQ ID NO: 753 - DNA, 1112 bp, synthetic construct
  source 1..1112: mol_type = other DNA; note = OR51B5(G5S)
ggatccgccaccatgagccaccagatcctgctgctcctggccctgctgaccctaggcctggctgattacaaggacgacgacgataagatcgaattgatgaacgggaccgagggcccaaacttctacgtgcctttctccaacaagacgggcgtggtggaattcatgtcgtccagcagcagctcccatcccttcctattgactggttttccaggcttggaggaagctcatcactggatttccgtatttttcttgttcatgtatatatccatcctttttggcaatggcaccctccttcttctcattaaggaagatcacaatcttcatgagcccatgtacttctttctggccatgctggctgccacagacctggggctggccctgaccacaatgcccacggtgctgggagtcctctggctggatcacagggagattggaagtgcggcctgcttttcccaggcctactttatacactcactttcctttctcgagtctggcattctgcttgccatggcctatgaccgttttattgccatctgcaaccctcttagatatacctctgtacttactaatactcgagtagtgaagattgggctgggagttctgatgaggggatttgtatccgttgttcccccaatcaggcccctctatttttttctgtattgtcactcccatgttctttcacatgcattctgccttcaccaggatgtcattaaactcgcctgtgctgataccaccttcaaccgactgtacccagctgtgcttgtagtctttatatttgtgctggattatctgattatcttcatctcctatgtgttgatactcaagactgtcctgagcattgcctccagagaggagagggccaaggctctcattacctgtgtctcccatatctgctgtgtcctggttttttatgtcacagtgattggattgtctctgattcatcgttttggaaagcaggttccacatattgttcacctcattatgagctatgcctattttctgttccctccactaatgaatcctataacatatagtgtcaggaacaaacagattcgagatgccttaaagaggttgctaaagagaaagtgctgcaggagaaggtgagcggccgc

SEQ ID NO: 754 - DNA, 1112 bp, synthetic construct
  source 1..1112: mol_type = other DNA; note = OR51B5(I102T,P160L)
ggatccgccaccatgagccaccagatcctgctgctcctggccctgctgaccctaggcctggctgattacaaggacgacgacgataagatcgaattgatgaacgggaccgagggcccaaacttctacgtgcctttctccaacaagacgggcgtggtggaattcatgtcgtccagcggcagctcccatcccttcctattgactggttttccaggcttggaggaagctcatcactggatttccgtatttttcttgttcatgtatatatccatcctttttggcaatggcaccctccttcttctcattaaggaagatcacaatcttcatgagcccatgtacttctttctggccatgctggctgccacagacctggggctggccctgaccacaatgcccacggtgctgggagtcctctggctggatcacagggagattggaagtgcggcctgcttttcccaggcctactttacacactcactttcctttctcgagtctggcattctgcttgccatggcctatgaccgttttattgccatctgcaaccctcttagatatacctctgtacttactaatactcgagtagtgaagattgggctgggagttctgatgaggggatttgtatccgttgttcccccaatcaggctcctctatttttttctgtattgtcactcccatgttctttcacatgcattctgccttcaccaggatgtcattaaactcgcctgtgctgataccaccttcaaccgactgtacccagctgtgcttgtagtctttatatttgtgctggattatctgattatcttcatctcctatgtgttgatactcaagactgtcctgagcattgcctccagagaggagagggccaaggctctcattacctgtgtctcccatatctgctgtgtcctggttttttatgtcacagtgattggattgtctctgattcatcgttttggaaagcaggttccacatattgttcacctcattatgagctatgcctattttctgttccctccactaatgaatcctataacatatagtgtcaggaacaaacagattcgagatgccttaaagaggttgctaaagagaaagtgctgcaggagaaggtgagcggccgc

SEQ ID NO: 755 - DNA, 1112 bp, synthetic construct
  source 1..1112: mol_type = other DNA; note = OR51B6
ggatccgccaccatgagccaccagatcctgctgctcctggccctgctgaccctaggcctggctgattacaaggacgacgacgataagatcgaattgatgaacgggaccgagggcccaaacttctacgtgcctttctccaacaagacgggcgtggtggaattcatggggctcaataagtctgcttccaccttccagcttactggcttcccaggcatggagaaggcacatcactggatattcatcccattattggcagcctacatctccatacttcttggcaatggcactcttctctttctcatcaggaatgatcataacctccatgagcccatgtactatttcttagctatgttggcagctacagacctcggagtgacattgaccacaatgcccacagtgctaggtgttctgtggttagatcacagggagattggccatggagcctgcttctctcaggcctattttatccatactctttctgtcatggagtcaggtgtcttgcttgccatggcttatgactgtttcattaccatccgcagccccttaagatatacctctatcctgaccaacacccaggtaatgaagattggtgtgcgggtattgacaagggctggtctgtccattatgccaatagttgttcgcctacactggtttccctactgtcgatcccatgtactctcccatgctttctgtctacaccaagatgtcatcaagctagcctgtgctgacatcaccttcaaccgtctctatccagttgtagttttatttgcaatggtcttgttggactttctcatcatctttttctcctacattttgattctcaagactgtcatgggcattggttctggaggagaaagggccaaggccctcaacacatgtgtctctcatatctgctgcatcctggtcttctatgtcactgtagtttgtctgacatttattcataggtttggaaagcatgttcctcatgtcgttcacatcacaatgagctacatccacttccttttcccaccttttatgaacccatttatctatagcattaggaacaaacagattcgagatgccttaaagaggttgctaaagagaaagtgctgcaggagaaggtgagcggccgc

SEQ ID NO: 756 - DNA, 1112 bp, synthetic construct
  source 1..1112: mol_type = other DNA; note = OR51B6(var 3)
ggatccgccaccatgagccaccagatcctgctgctcctggccctgctgaccctaggcctggctgattacaaggacgacgacgataagatcgaattgatgaacgggaccgagggcccaaacttctacgtgcctttctccaacaagacgggcgtggtggaattcatggggctcaatacgtctgcttccaccttccagcttactggcttcccaggcatggagaaggcacatcactggatattcatcccattattggcagcctacatctccatacttcttggcagtggcactcttctctttctcatcaggaatgatcataacctccatgagcccatgtactatttcttagctatgttggcagctacagacctcggagtgacattgaccacaatgcccacagtgctaggtgttctgtggttagatcacagggagactggccatggagcctgcttctctcaggcctattttatccatactctttctgtcatggagtcaggtgtcttgcttgccatggcttatgactgtttcattaccatccgcagccccttaagatatatctctatcctgaccaacacccaggtaatgaagattggtgtgggggtattgacaagggctggtctgtccattatgccaatagttgttcgcctacactggtttccctactgtcgagcccatgtattctcccatgctttctgtctacaccaagatgtcatcaagctagcctgtgctgacatcaccttcaaccgtctctatccagttgtagttttatttgcaatggtcttgttggactttctcatcatctttttctcctacattttgattctcaagactgtcatgggcattggttctggaggagaaagggccaaggccctcaacacatgtgtctctcatatctgctgcatcctggtcttctatgtcactgtagtttgtctgacatttattcataggtttggaaagcatgttcctcatgtcgttcacatcacaatgcgctacatccacttccttttcccaccttttatgaacccatttatctatagcattaggaacaaacagattcgagatgccttaaagaggttgctaaagagaaagtgctgcaggagaaggtgagcggccgc

SEQ ID NO: 757 - DNA, 1154 bp, synthetic construct
  source 1..1154: mol_type = other DNA; note = OR51D1
ggatccgccaccatgagccaccagatcctgctgctcctggccctgctgaccctaggcctggctgattacaaggacgacgacgataagatcgaattgatgaacgggaccgagggcccaaacttctacgtgcctttctccaacaagacgggcgtggtggaattcatgcagaagccccagctcttggtccctatcatagccacttcaaatggaaatctggtccacgcagcatacttccttttggtgggtatccctggcctggggcctaccatacacttttggctggctttcccactgtgttttatgtatgccttggccaccctgggtaacctgaccattgtcctcatcattcgtgtggagaggcgactgcatgagcccatgtacctcttcctggccatgctttccactattgacctagtcctctcctctatcaccatgcccaagatggccagtcttttcctgatgggcatccaggagatcgagttcaacatttgcctggcccagatgttccttatccatgctctgtcagccgtggagtcagctgtcctgctggccatggcttttgaccgctttgtggccatttgccacccattgcgccatgcttctgtgctgacagggtgtactgtggccaagattggactatctgccctgaccagggggtttgtattcttcttcccactgcccttcatcctcaagtggttgtcctactgccaaacacatactgtcacacactccttctgtctgcaccaagatattatgaagctgtcctgtactgacaccagggtcaatgtggtttatggactcttcatcatcctctcagtcatgggtgtggactctctcttcattggcttctcatatatcctcatcctgtgggctgttttggagctgtcctctcggagggcagcactcaaggctttcaacacctgcatctcccacctctgtgctgttctggtcttctatgtacccctcattgggctctcggtggtgcataggctgggtggtcccacctccctcctccatgtggttatggctaatacctacttgctgctaccacctgtagtcaacccccttgtctatggagccaggaacaaacagattcgagatgccttaaagaggttgctaaagagaaagtgctgcaggagaaggtgagcggccgc

SEQ ID NO: 758 - DNA, 1124 bp, synthetic construct
  source 1..1124: mol_type = other DNA; note = OR51E1
ggatccgccaccatgagccaccagatcctgctgctcctggccctgctgaccctaggcctggctgattacaaggacgacgacgataagatcgaattgatgaacgggaccgagggcccaaacttctacgtgcctttctccaacaagacgggcgtggtggaattcatgatggtggatcccaatggcaatgaatccagtgctacatacttcatcctaataggcctccctggtttagaagaggctcagttctggttggccttcccattgtgctccctctaccttattgctgtgctaggtaacttgacaatcatctacattgtgcggactgagcacagcctgcatgagcccatgtatatatttctttgcatgctttcaggcattgacatcctcatctccacctcatccatgcccaaaatgctggccatcttctggttcaattccactaccatccagtttgatgcttgtctgctacagatgtttgccatccactccttatctggcatggaatccacagtgctgctggccatggcttttgaccgctatgtggccatctgtcacccactgcgccatgccacagtacttacgttgcctcgtgtcaccaaaattggtgtggctgctgtggtgcggggggctgcactgatggcaccccttcctgtcttcatcaagcagctgcccttctgccgctccaatatcctttcccattcctactgcctacaccaagatgtcatgaagctggcctgtgatgatatccgggtcaatgtcgtctatggccttatcgtcatcatctccgccattggcctggactcacttctcatctccttctcatatctgcttattcttaagactgtgttgggcttgacacgtgaagcccaggccaaggcatttggcacttgcgtctctcatgtgtgtgctgtgttcatattctatgtacctttcattggattgtccatggtgcatcgctttagcaagcggcgtgactctccgctgcccgtcatcttggccaatatctatctgctggttcctcctgtgctcaacccaattgtctatggagtgaggaacaaacagattcgagatgccttaaagaggttgctaaagagaaagtgctgcaggagaaggtgagcggccgc

SEQ ID NO: 759 - DNA, 1115 bp, synthetic construct
  source 1..1115: mol_type = other DNA; note = OR51E2
ggatccgccaccatgagccaccagatcctgctgctcctggccctgctgaccctaggcctggctgattacaaggacgacgacgataagatcgaattgatgaacgggaccgagggcccaaacttctacgtgcctttctccaacaagacgggcgtggtggaattcatgagttcctgcaacttcacacatgccacctttgtgcttattggtatcccaggattagagaaagcccatttctgggttggcttccccctcctttccatgtatgtagtggcaatgtttggaaactgcatcgtggtcttcatcgtaaggacggaacgcagcctgcacgctccgatgtacctctttctctgcatgcttgcagccattgacctggccttatccacatccaccatgcctaagatccttgcccttttctggtttgattcccgagagattagctttgaggcctgtcttacccagatgttctttattcatgccctctcagccattgaatccaccatcctgctggccatggcctttgaccgttatgtggccatctgccacccactgcgccatgctgcagtgctcaacaatacagtaacagcccagattggcatcgtggctgtggtccgcggatccctcttttttttcccactgcctctgctgatcaagcggctggccttctgccactccaatgtcctctcgcactcctattgtgtccaccaggatgtaatgaagttggcctatgcagacactttgcccaatgtggtatatggtcttactgccattctgctggtcatgggcgtggacgtaatgttcatctccttgtcctattttctgataatacgaacggttctgcaactgccttccaagtcagagcgggccaaggcctttggaacctgtgtgtcacacattggtgtggtactcgccttctatgtgccacttattggcctctcagtggtacaccgctttggaaacagccttcatcccattgtgcgtgttgtcatgggtgacatctacctgctgctgcctcctgtcatcaatcccatcatctatggtgccaggaacaaacagattcgagatgccttaaagaggttgctaaagagaaagtgctgcaggagaaggtgagcggccgc

SEQ ID NO: 760 - DNA, 1124 bp, synthetic construct
  source 1..1124: mol_type = other DNA; note = OR51F1
ggatccgccaccatgagccaccagatcctgctgctcctggccctgctgaccctaggcctggctgattacaaggacgacgacgataagatcgaattgatgaacgggaccgagggcccaaacttctacgtgcctttctccaacaagacgggcgtggtggaattcatggaaatcctaagcaactcaacatctaaatttccaaccttcttgttgaccggcattcctggcctagagtctgcccatgtctggatctccattcctttctgttgtttttatgccattgccctctctgggaacagcgtgatcctgtttgtcatcattacccagcagagtctccatgaacccatgtattatttcctcttcaggctatcagccactgatctgggcttgactgtttcttcattgtcaacaacattaggtatcctctggtttgaggcacgtgaaatcagtctatatagctgcattgtccagatgttttttcttcatggattcacttttatggaatctggagtgctggtggctacagcctttgaccgttatgtggccatctgtgaccctctgaggtacactaccattctcactaattccagaatcattcaaatgggtcttctgatgattacacgtgctatagtactaatattgccactacttttgctccttaagcctctctatttctgtagaatgaatgccctttctcactcctattgttaccatccagatgtgattcaattagcatgttcagacattcgggcaaatagcatctgtggattaattgatctcatcctgaccactggaatagatacaccatgcattgtcctgtcatatatcttaattattcactctgtcctcagaattgcctcccctgaagaatggcacaaggtcttcagcacctgtgtctcccatgtgggagcagttgctttcttctacatccacatgctgagcctgtccttggtgtatcgctatggtcggtcagcccccagagtagtccattcagtgatggctaatgtatacctgcttttaccccctgtgctcaaccccatcatcgacagtgtaaggaacaaacagattcgagatgccttaaagaggttgctaaagagaaagtgctgcaggagaaggtgagcggccgc

SEQ ID NO: 761 - DNA, 1124 bp, synthetic construct
  source 1..1124: mol_type = other DNA; note = OR51F2
ggatccgccaccatgagccaccagatcctgctgctcctggccctgctgaccctaggcctggctgattacaaggacgacgacgataagatcgaattgatgaacgggaccgagggcccaaacttctacgtgcctttctccaacaagacgggcgtggtggaattcatgtcggtcctcaataataccattgctgagcctctgatcttcctcctgatgggcattccaggcctgaaagccacccagtactggatctccatccctttttgtctcctatatgttgttgccgtctctggaaatagcatgatcctgtttgtggtcctctgtgaacggagcctccataagcctatgtactatttcctctctatgctttcagccacagacctgagcttgtccctgtgtacactttctactacccttggtgtcttctggtttgaagcccgagaaatcaacctaaatgcctgcattgcccagatgttctttctacacggatttactttcatggagtctggggttctactggccatggcctttgatcgttttgtggccatctgttacccactgagatacactaccatccttaccaatgcccgaattgccaagattgggatgagcatgttgataagaaatgttgccgtcatgttgccagtcatgctctttgtcaagaggttgtccttctgcagttctatggtcctttcacattcttactgctaccatgttgatctcatccaactctcctgcacagacaataggatcaacagcatccttggtctgtttgcgcttttgtccactacagggtttgactgcccttgcatcctgctctcctatatcctgatcattcgatctgtcctcagcattgcttcctcagaagagaggcggaaagccttcaacacctgcacatcccacatcagtgctgtttccatcttctacctccctctcatcagtttgtctcttgtccatcgctatggccattcagcacctccatttgtccacatcatcatggccaatgtctttctgctaatccctcctgtgctcaaccctattatttacagtgtaaggaacaaacagattcgagatgccttaaagaggttgctaaagagaaagtgctgcaggagaaggtgagcggccgc

SEQ ID NO: 762 - DNA, 1124 bp, synthetic construct
  source 1..1124: mol_type = other DNA; note = OR51G1
ggatccgccaccatgagccaccagatcctgctgctcctggccctgctgaccctaggcctggctgattacaaggacgacgacgataagatcgaattgatgaacgggaccgagggcccaaacttctacgtgcctttctccaacaagacgggcgtggtggaattcatgacaattcttcttaatagcagcctccaaagagccactttcttcctgacgggcttccaaggtctagaaggtctccatggctggatctctattcccttctgcttcatctacctgacagttatcttggggaacctcaccattctccacgtcatttgtactgatgccactctccatggacccatgtactatttcttgggcatgctagctgtcacagacttaggcctttgcctttccacactgcccactgtgctgggcattttctggtttgataccagagagattggcatccctgcctgtttcactcagctcttcttcatccacaccttgtcttcaatggagtcatcagttctgttatccatgtccattgaccgctacgtggccgtctgcaacccactgcatgactccaccgtcctgacacctgcatgtattgtcaagatggggctaagctcagtgcttagaagtgctctcctcatcctccccttgccattcctcctgaagcgcttccaatactgccactcccatgtgctggctcatgcttattgtcttcacctggagatcatgaagctggcctgctctagcatcattgtcaatcacatctatgggctctttgttgtggcctgcaccgtgggtgtggactccctgctcatctttctctcatacgccctcatccttcgcaccgtgctcagcattgcctcccaccaggagcgactccgagccctcaacacctgtgtctctcatatctgtgctgtactgctcttctacatccccatgattggcttgtctcttgtgcatcgctttggtgaacatctgccccgcgttgtacacctcttcatgtcctatgtgtatctgctggtaccaccccttatgaaccccatcatctacagcatcaggaacaaacagattcgagatgccttaaagaggttgctaaagagaaagtgctgcaggagaaggtgagcggccgc

SEQ ID NO: 763 - DNA, 1133 bp, synthetic construct
  source 1..1133: mol_type = other DNA; note = OR51G2
ggatccgccaccatgagccaccagatcctgctgctcctggccctgctgaccctaggcctggctgattacaaggacgacgacgataagatcgaattgatgaacgggaccgagggcccaaacttctacgtgcctttctccaacaagacgggcgtggtggaattcatgaccctgggatccctgggaaacagcagcagcagcgtttctgctaccttcctgctgagtggcatccctgggctggagcgcatgcacatctggatctccatcccactgtgcttcatgtatctggtttccatcccgggcaactgcacaattctttttatcattaaaacagagcgctcacttcatgaacctatgtatctcttcctgtccatgctggctctgattgacctgggtctctccctttgcactctccctacagtcctgggcatcttttgggttggagcacgagaaattagccatgatgcctgctttgctcagctctttttcattcactgcttctccttcctcgagtcctctgtgctactgtctatggcctttgaccgctttgtggctatctgccaccccttgcactatgtttccattctcaccaacacagtcattggcaggattggcctggtctctctgggtcgtagtgtagcactcatttttccattaccttttatgctcaaaagattcccctattgtggctccccagttctctcacattcttattgtctccaccaagaagtgatgaaattggcctgtgccgacatgaaggccaacagcatctacggcatgtttgtcatcgtctctacagtgggtatagactcactgctcatcctcttctcttatgctctgatcctgcgcaccgtgctgtccatcgcctccagggctgagagattcaaggcccttaacacctgtgtttcccacatctgtgctgtgctgctcttctacactcccatgattggcctctctgtcatccatcgctttggaaagcaggcaccccacctggtccaggtggtcatgggtttcatgtatcttctctttcctcctgtgatgaatcccattgtctacagtgtgaggaacaaacagattcgagatgccttaaagaggttgctaaagagaaagtgctgcaggagaaggtgagcggccgc

SEQ ID NO: 764 - DNA, 1124 bp, synthetic construct
  source 1..1124: mol_type = other DNA; note = OR51I1
ggatccgccaccatgagccaccagatcctgctgctcctggccctgctgaccctaggcctggctgattacaaggacgacgacgataagatcgaattgatgaacgggaccgagggcccaaacttctacgtgcctttctccaacaagacgggcgtggtggaattcatgctgggtctcaatggcacccccttccagccagcaacactccagctgacaggcattcctgggatacaaacaggcctcacctgggttgccctgattttctgcatcctctacatgatctccattgtaggtaacctcagcattctcactctggtgttttgggagcctgctctgcatcagcccatgtactacttcctctctatgctcgctctcaatgatctgggagtgtccttttctacacttcccactgtgatttctactttctgcttcaactacaaccatgttgcgtttaatgcttgcctggtccagatgttcttcatccacactttctccttcatggagtcaggcatactgctggccatgagcttggatcgctttgtggctatttgttatccattacgctatgtcactgtgctcactcacaaccgtatattggctatgggtctgggcatccttaccaagagtttcaccactctcttccctttcccttttgtggtgaaacgactgcccttctgcaaaggcaatgttttgcatcactcctactgtctccatccagatctcatgaaagtagcatgtggagacatccatgttaacaacatttatgggctcttggtgatcatttttacctatggtatggactcaactttcatcctgctttcctacgcattgatcctgagagccatgctggtcatcatatcccaggaacagcggctcaaggcactcaacacctgcatgtcacacatctgtgcagtgctggccttttatgtgcccataattgctgtctccatgattcaccgcttctggaaaagtgctccacctgttgttcatgtcatgatgtccaatgtctacctgtttgtaccacccatgctcaaccctatcatctacagtgtgaggaacaaacagattcgagatgccttaaagaggttgctaaagagaaagtgctgcaggagaaggtgagcggccgc

SEQ ID NO: 765 - DNA, 1124 bp, synthetic construct
  source 1..1124: mol_type = other DNA; note = OR51I1(A252S)
ggatccgccaccatgagccaccagatcctgctgctcctggccctgctgaccctaggcctggctgattacaaggacgacgacgataagatcgaattgatgaacgggaccgagggcccaaacttctacgtgcctttctccaacaagacgggcgtggtggaattcatgctgggtctcaatggcacccccttccagccagcaacactccagctgacaggcattcctgggatacaaacaggcctcacctgggttgccctgattttctgcatcctctacatgatctccattgtaggtaacctcagcattctcactctggtgttttgggagcctgctctgcatcagcccatgtactacttcctctctatgctcgctctcaatgatctgggagtgtccttttctacacttcccactgtgatttctactttctgcttcaactacaaccatgttgcgtttaatgcttgcctggtccagatgttcttcatccacactttctccttcatggagtcaggcatactgctggccatgagcttggatcgctttgtggctatttgttatccattacgctatgtcactgtgctcactcacaaccgtatattggctatgggtctgggcatccttaccaagagtttcaccactctcttccctttcccttttgtggtgaaacgactgcccttctgcaaaggcaatgttttgcatcactcctactgtctccatccagatctcatgaaagtagcatgtggagacatccatgttaacaacatttatgggctcttggtgatcatttttacctatggtatggactcaactttcatcctgctttcctacgcattgatcctgagagccatgctggtcatcatatcccaggaacagcggctcaaggcactcaacacctgcatgtcacacatctgtgcagtgctgtccttttatgtgcccataattgctgtctccatgattcaccgcttctggaaaagtgctccacctgttgttcatgtcatgatgtccaatgtctacctgtttgtaccacccatgctcaaccctatcatctacagtgtgaggaacaaacagattcgagatgccttaaagaggttgctaaagagaaagtgctgcaggagaaggtgagcggccgc

SEQ ID NO: 766 - DNA, 1118 bp, synthetic construct
  source 1..1118: mol_type = other DNA; note = OR51I2
ggatccgccaccatgagccaccagatcctgctgctcctggccctgctgaccctaggcctggctgattacaaggacgacgacgataagatcgaattgatgaacgggaccgagggcccaaacttctacgtgcctttctccaacaagacgggcgtggtggaattcatggggttgttcaatgtcactcaccctgcattcttcctcctgactggtatccctggtctggagagctctcactcctggctgtcagggcccctctgcgtgatgtatgctgtggcccttgggggaaatacagtgatcctgcaggctgtgcgagtggagcccagcctccatgagcccatgtactacttcctgtccatgttgtccttcagtgatgtggccatatccatggccacactgcccactgtactccgaaccttctgcctcaatgcccgcaacatcacttttgatgcctgtctaattcagatgtttcttattcacttcttctccatgatggaatcaggtattctgctggccatgagttttgaccgctatgtggccatttgtgaccccttgcgctatgcaactgtgctcaccactgaagtcattgctgcaatgggtttaggtgcagctgctcgaagcttcatcacccttttccctcttccctttcttattaagaggctgcctatctgcagatccaatgttctttctcactcctactgcctgcacccagacatgatgaggcttgcctgtgctgatatcagtatcaacagcatctatggactctttgttcttgtatccacctttggcatggacctgttttttatcttcctctcctatgtgctcattctgcgttctgtcatggccactgcttcccgtgaggaacgcctcaaagctctcaacacatgtgtgtcacatatcctggctgtacttgcattttatgtgccaatgattggggtctccacagtgcaccgctttgggaagcatgtcccatgctacatacatgtcctcatgtcaaatgtgtacctatttgtgcctcctgtgctcaaccctctcatttatagcgccaggaacaaacagattcgagatgccttaaagaggttgctaaagagaaagtgctgcaggagaaggtgagcggccgc

SEQ ID NO: 767 - DNA, 1124 bp, synthetic construct
  source 1..1124: mol_type = other DNA; note = OR51J1
ggatccgccaccatgagccaccagatcctgctgctcctggccctgctgaccctaggcctggctgattacaaggacgacgacgataagatcgaattgatgaacgggaccgagggcccaaacttctacgtgcctttctccaacaagacgggcgtggtggaattcatgaaaatttctaataactctttggggtttttacctacgactttcattttggttggcatcccagggctggagtcagagcacctctggatatccgtccccttctccctgatatacatcatcattttccttgggaatggcatcattcttcacgtcatcagaacagatattgccctacatcaacccatgtacctcttccttgccatgttggcactggccgaggttcgtgtctctgcatccaccctgcctacagtgttaggcatattcctttttggaaatactgaaattagtcttgaagcttgtctttttccagatgttctccatccattctttatccatgatggagccagctgtgctgctggccatgtctttggaccgctttatagccatctacagcccactgagctacacagctatcctgacactgcccagggtctttggcacaggagctattatcgtactgaaaagcattatgctcatggctccgttgcccattctcttatggcgtctgcccttctgtggccacaatgccctctcacattcctattgtctgcaccccaatcttatctatcttgtgggaacatttctgttaacaatatctatgggattttcattgttacctctacttttgggctggattcgttgctgattgtgatctcctatgggctcatactccacactgtattgggtattgccactggagaagggaggaagaaggcactcaacacatgtggctcacacgtctgtgctgtgcttgcttactatgtgcctatgattggcttgtctatagtgcaccgccttggacatcgtgtgtcccctctgctgcaagccatgatggccaatgcctacctcttcttcccacctgttgtcaatcctattgtctacagcattaggaacaaacagattcgagatgccttaaagaggttgctaaagagaaagtgctgcaggagaaggtgagcggccgc

SEQ ID NO: 768 - DNA, 1124 bp, synthetic construct
  source 1..1124: mol_type = other DNA; note = OR51L1
ggatccgccaccatgagccaccagatcctgctgctcctggccctgctgaccctaggcctggctgattacaaggacgacgacgataagatcgaattgatgaacgggaccgagggcccaaacttctacgtgcctttctccaacaagacgggcgtggtggaattcatgggagactggaataacagtgatgctgtggagcccatatttatcctgaggggttttcctggactggagtatgttcattcttggctctccatcctcttctgtcttgcatatttggtagcatttatgggtaatgttaccatcctgtctgtcatttggatagaatcctctctccatcagcccatgtattactttatttccatcttagcagtgaatgacctggggatgtccctgtctacacttcccaccatgcttgctgtgttatggttggatgctccagagatccaggcaagtgcttgctatgctcagctgttcttcatccacacattcacattcctggagtcctcagtgttgctggccatggcctttgaccgttttgttgctatctgccatccactgcactaccccaccatcctcaccaacagtgtaattggcaaaattggtttggcctgtttgctacgaagcttgggagttgtacttcccacacctttgctactgagacactatcactactgccatggcaatgccctctctcacgccttctgtttgcaccaggatgttctaagattatcctgtacagatgccaggaccaacagtatttatgggctttgtgtagtcattgccacactaggtgtggattcaatcttcatacttctttcttatgttctgattcttaatactgtgctggatattgcatctcgtgaagagcagctaaaggcactcaacacatgtgtatcccatatctgtgtggtgcttatcttctttgtgccagttattggggtgtcaatggtccatcgctttgggaagcatctgtctcccatagtccacatcctcatggcagacatctaccttcttcttcccccagtccttaaccctattgtctatagtgtcaggaacaaacagattcgagatgccttaaagaggttgctaaagagaaagtgctgcaggagaaggtgagcggccgc

SEQ ID NO: 769 - DNA, 1121 bp, synthetic construct
  source 1..1121: mol_type = other DNA; note = OR51M1
ggatccgccaccatgagccaccagatcctgctgctcctggccctgctgaccctaggcctggctgattacaaggacgacgacgataagatcgaattgatgaacgggaccgagggcccaaacttctacgtgcctttctccaacaagacgggcgtggtggaattcatgctgctatccaacattactcagtttagccccatattctatctcaccagctttcctggattggaaggcatcaaacactggattttcatcccctttttctttatgtacatggttgccatctcaggcaattgtttcattctgatcattattaagaccaaccctcgtctgcacacacccatgtactatctactatccttgctggccctcactgacctggggctgtgtgtgtccacgttgcccaccactatggggatcttctggtttaactcccagagtatctactttggagcgtgtcaaatccagatgttctgcatccactctttttccttcatggagtcctcagtgctcctcatgatgtcctttgaccgccttgtggccatctgccaccctctgaggtattcggtcattatcactggccagcaagtggtcagagcaggcctaattgtcatcttccggggacctgtggccactatccctattgtcctcctcctgaaggcttttccctactgtggatctgtggtcctctcccactcattttgcctgcaccaggaagtgatacagctggcctgcacagataccaccttcaataatctgtatggactgatggtggtagttttcactgtgatgctggacctggtgctcatcgcactgtcctatggactcatcctgcacacagtagcaggcctggcctcccaagaggagcagcgccgtgcctttcagacatgcaccgctcctctctgtgctgtgctagtattctttgtgcccatgatggggctgtccctggtgcaccgttttgggaagcatgccccacctgctattcatcttcttatggccaatgtctacctttttgtgcctcccatgcttaacccaatcatatacagcattaggaacaaacagattcgagatgccttaaagaggttgctaaagagaaagtgctgcaggagaaggtgagcggccgc

SEQ ID NO: 770 - DNA, 1124 bp, synthetic construct
  source 1..1124: mol_type = other DNA; note = OR51Q1
ggatccgccaccatgagccaccagatcctgctgctcctggccctgctgaccctaggcctggctgattacaaggacgacgacgataagatcgaattgatgaacgggaccgagggcccaaacttctacgtgcctttctccaacaagacgggcgtggtggaattcatgtcccaggtgactaacaccacacaagaaggcatctacttcatcctcacggacatccctggatttgaggcctcccacatctggatctccatccccgtctgctgtctctacaccatctccatcatgggcaataccaccatcctcactgtcattcgcacagagccatctgtccaccagcgcatgtatctgtttctctccatgctggccctgacggacctgggtctcaccctcaccaccctacccacagtcatgcagcttctctggttcaacgttcgtagaatcagctctgaggcctgttttgctcagtttttcttccttcatggattctcctttatggagtcttctgtcctcctggctatgtccgttgactgctatgtggccatctgctgtcccctccattatgcctccatcctcaccaatgaagtcattggtagaactgggttagccatcatttgctgctgtgttctggcggttcttccctcccttttcttactcaagcgactgcctttctgccactcccaccttctctctcgctcctattgcctccaccaggatatgatccgcctggtctgtgctgacatcaggctcaacagctggtatggatttgctcttgccttgctcattattatcgtggatcctctgctcattgtgatctcctatacacttattctgaaaaatatcttgggcacagccacctgggctgagcgactccgtgccctcaataactgcctgtcccacattctagctgtcctggtcctctacattcccatggttggtgtatctatgactcatcgctttgccaagcatgcctctccactggtccatgttatcatggccaatatctacctgctggcacccccggtgatgaaccccatcatttacagtgtaaggaacaaacagattcgagatgccttaaagaggttgctaaagagaaagtgctgcaggagaaggtgagcggccgc

SEQ ID NO: 771 - DNA, 1094 bp, synthetic construct
  source 1..1094: mol_type = other DNA; note = OR51S1
ggatccgccaccatgagccaccagatcctgctgctcctggccctgctgaccctaggcctggctgattacaaggacgacgacgataagatcgaattgatgaacgggaccgagggcccaaacttctacgtgcctttctccaacaagacgggcgtggtggaattcatggcccccaccttcttgctggtgggcatgccaggcctatcaggtgcaccctcctggtggacattgcccctcattgctgtctaccttctctctgcactgggaaatggcaccatcctctggatcattgccctgcagcccgccctgcaccgcccaatgcacttcttcctcttcttgcttagtgtgtctgatattggattggtcactgccctgatgcccacactgctgggcatcgcccttgctggtgctcacactgtccctgcctcagcctgccttctacagatggtttttatccatgtcttttctgtcatggagtcctctgtcttgctcgccatgtccattgatcgggcactggccatctgccgacctctccactacccagcgctcctcaccaatggtgtaattagcaaaatcagcctggccatttcttttcgatgcctgggtctccatctgcccctgccattcctgctggcctacatgccctactgcctcccacaggtcctaacccattcttattgcttgcatccagatgtggctcgtttggcctgcccagaagcttggggtgcagcctacagcctatttgtggttctttcagccatgggtttggaccccctgcttattttcttctcctatggcctgattggcaaggtgttgcaaggtgtggagtccagagaggatcgctggaaggctggtcaaacctgtgctgcccacctctctgcagtgctcctcttctatatccctatgatcctcctggcactgattaaccatcctgagctgccaatcactcagcatacccatactcttctatcctatgtccatttccttcttcctccattgataaaccctattctctatagtgtcaggaacaaacagattcgagatgccttaaagaggttgctaaagagaaagtgctgcaggagaaggtgagcggccgc

SEQ ID NO: 772 - DNA, 1094 bp, synthetic construct
  source 1..1094: mol_type = other DNA; note = OR51S1(Q45E,L163R,L249F)
ggatccgccaccatgagccaccagatcctgctgctcctggccctgctgaccctaggcctggctgattacaaggacgacgacgataagatcgaattgatgaacgggaccgagggcccaaacttctacgtgcctttctccaacaagacgggcgtggtggaattcatggcccccaccttcttgctggtgggcatgccaggcctatcaggtgcaccctcctggtggacattgcccctcattgctgtctaccttctctctgcactgggaaatggcaccatcctctggatcattgccctggagcccgccctgcaccgcccaatgcacttcttcctcttcttgcttagtgtgtctgatattggattggtcactgccctgatgcccacactgctgggcatcgcccttgctggtgctcacactgtccctgcctcagcctgccttctacagatggtttttatccatgtcttttctgtcatggagtcctctgtcttgctcgccatgtccattgatcgggcactggccatctgccgacctctccactacccagcgctcctcaccaatggtgtaattagcaaaatcagcctggccatttcttttcgatgcctgggtctccatctgcccctgccattcctgctggcctacatgccctactgccgcccacaggtcctaacccattcttattgcttgcatccagatgtggctcgtttggcctgcccagaagcttggggtgcagcctacagcctatttgtggttctttcagccatgggtttggaccccctgcttattttcttctcctatggcctgattggcaaggtgttgcaaggtgtggagtccagagaggatcgctggaaggctggtcaaacctgtgctgcccacctctctgcagtgctcctcttctatatccctatgatcttcctggcactgattaaccatcctgagctgccaatcactcagcatacccatactcttctatcctatgtccatttccttcttcctccattgataaaccctattctctatagtgtcaggaacaaacagattcgagatgccttaaagaggttgctaaagagaaagtgctgcaggagaaggtgagcggccgc

SEQ ID NO: 773 - DNA, 1124 bp, synthetic construct
  source 1..1124: mol_type = other DNA; note = OR51T1
ggatccgccaccatgagccaccagatcctgctgctcctggccctgctgaccctaggcctggctgattacaaggacgacgacgataagatcgaattgatgaacgggaccgagggcccaaacttctacgtgcctttctccaacaagacgggcgtggtggaattcatggcaatattcaataacaccacttcgtcttcctcaaacttcctcctcactgcattccctgggctggaatgtgctcatgtctggatctccattccagtctgctgtctctacaccattgccctcttgggaaacagtatgatctttcttgtcatcattactaagcggagactccacaaacccatgtattatttcctctccatgctggcagctgttgatctatgtctgaccattacgacccttcccactgtgcttggtgttctctggtttcatgcccgggagatcagctttaaagcttgcttcattcaaatgttctttgtgcatgctttctccttgctggagtcctcggtgctggtagccatggcctttgaccgcttcgtggctatctgtaacccactgaactatgctactatcctcacagacaggatggtcctggtgatagggctggtcatctgcattagaccagcagttttcttacttccccttcttgtagccataaacactgtgtcttttcatgggggtcacgagctttcccatccattttgctaccacccagaagtgatcaaatacacatattccaaaccttggatcagcagtttttggggactgtttcttcagctctacctgaatggcactgacgtattgtttattcttttctcctatgtcctgatcctccgtactgttctgggcattgtggcccgaaagaagcaacaaaaagctctcagcacttgtgtctgtcacatctgtgcagtcactattttctatgtgccactgatcagcctctctttggcacaccgcctcttccactccaccccaagggtgctctgtagcactttggccaatatttatctgctcttaccacctgtgctgaaccctatcatttacagcttgaggaacaaacagattcgagatgccttaaagaggttgctaaagagaaagtgctgcaggagaaggtgagcggccgc

SEQ ID NO: 774 - DNA, 1127 bp, synthetic construct
  source 1..1127: mol_type = other DNA; note = OR51V1
ggatccgccaccatgagccaccagatcctgctgctcctggccctgctgaccctaggcctggctgattacaaggacgacgacgataagatcgaattgatgaacgggaccgagggcccaaacttctacgtgcctttctccaacaagacgggcgtggtggaattcatgattacttcagtaagccctagcaccagcacgaattcttcctttcttctcactggattttctggcatggagcagcaatacccctggctttccatccccttctcctcaatctatgccatggtgcttttgggcaattgcatggttctccatgtgatatggactgagccaagcctgcaccagcctatgttttacttcctgtccatgctggccctcactgacctgtgcatggggctgtccactgtgtacacagtgctggggatcctgtgggggatcattcgagagatcagcttggattcctgcattgcccagtcctatttcatccatggtctgtccttcatggagtcctctgtcctcctcactatggcctttgaccggtacattgcaatttgcaatccactacgttattcctccatcctgactaattccagaattatcaaaattgggctcactataataggtaggagttttttctttattacaccccccatcatctgtctgaaattttttaattactgtcatttccacatcctttctcactctttctgcctgcaccaggatcttctccgcttagcctgttcagacatccgattcaatagttactatgccctgatgctggttatttgcatactgttgttggatgctatactcatccttttctcctacatcctgattcttaagtcagtcctggcagttgcctctcaggaagagaggcataaattatttcagacctgcatctcccacatctgtgctgtccttgtgttctacatccctatcattagcctcacaatggtgcaccgttttggcaagcacctttcccccgtggcccacgttctcattggcaacatctacatccttttcccacctttaatgaatcccatcatctacagtgtcaggaacaaacagattcgagatgccttaaagaggttgctaaagagaaagtgctgcaggagaaggtgagcggccgc

SEQ ID NO: 775 - DNA, 1127 bp, synthetic construct
  source 1..1127: mol_type = other DNA; note = OR51V1(L30F)
ggatccgccaccatgagccaccagatcctgctgctcctggccctgctgaccctaggcctggctgattacaaggacgacgacgataagatcgaattgatgaacgggaccgagggcccaaacttctacgtgcctttctccaacaagacgggcgtggtggaattcatgattacttcagtaagccctagcaccagcacgaattcttcctttcttctcactggattttctggcatggagcagcaatacccctggttttccatccccttctcctcaatctatgccatggtgcttttgggcaattgcatggttctccatgtgatatggactgagccaagcctgcaccagcctatgttttacttcctgtccatgctggccctcactgacctgtgcatggggctgtccactgtgtacacagtgctggggatcctgtgggggatcattcgagagatcagcttggattcctgcattgcccagtcctatttcatccatggtctgtccttcatggagtcctctgtcctcctcactatggcctttgaccggtacattgcaatttgcaatccactacgttattcctccatcctgactaattccagaattatcaaaattgggctcactataataggtaggagttttttctttattacaccccccatcatctgtctgaaattttttaattactgtcatttccacatcctttctcactctttctgcctgcaccaggatcttctccgcttagcctgttcagacatccgattcaatagttactatgccctgatgctggttatttgcatactgttgttggatgctatactcatccttttctcctacatcctgattcttaagtcagtcctggcagttgcctctcaggaagagaggcataaattatttcagacctgcatctcccacatctgtgctgtccttgtgttctacatccctatcattagcctcacaatggtgcaccgttttggcaagcacctttcccccgtggcccacgttctcattggcaacatctacatccttttcccacctttaatgaatcccatcatctacagtgtcaggaacaaacagattcgagatgccttaaagaggttgctaaagagaaagtgctgcaggagaaggtgagcggccgc

SEQ ID NO: 776 - DNA, 1127 bp, synthetic construct
  source 1..1127: mol_type = other DNA; note = OR52A1
ggatccgccaccatgagccaccagatcctgctgctcctggccctgctgaccctaggcctggctgattacaaggacgacgacgataagatcgaattgatgaacgggaccgagggcccaaacttctacgtgcctttctccaacaagacgggcgtggtggaattcatgtccatttccaacatcacagtctacatgccctctgtgttgacactagtagggatcccaggcctagaatctgtgcagtgctggattgggattccattctgtgccatttatctcattgctatgattggaaattccttgcttctgagcatcatcaaatctgagcgcagtctccatgagcccttgtacattttcttaggcatgctaggagccacagacattgcacttgctagcagcattatgccaaagatgcttggaatattctggtttaatgtgcctgaaatctattttgattcctgcttgcttcaaatgtggttcatccacacattgcagggtatagagtcaggcatccttgtggccatggccctggaccgttatgtggccatctgttatccactaagacatgccaacatcttcacccaccagcttgtcattcagataggaactatggtcgtactcagggctgctattcttgtagccccatgcctagtactgataaagtgccggtttcaattttatcacacaacagtcatctcccactcctactgtgagcatatggccattgtgaaactagcagcagcaaatgttcaagtcaacaaaatctatggtttgtttgtggccttcactgtagcaggatttgacctcacattcatcacattgtcctacatccagatatttatcacagtttttcgtttgccccagaaggaggctaggtttaaagcattcaatacctgcattgctcacatctgtgtcttcctccagttctacctccttgccttcttctccttcttcacacataggtttgggtctcacatctccccttatatccatattctcttttctagcatttacttgctggtccctccatttctcaatccacttgtctatggtgcaaggaacaaacagattcgagatgccttaaagaggttgctaaagagaaagtgctgcaggagaaggtgagcggccgc

SEQ ID NO: 777 - DNA, 1127 bp, synthetic construct
  source 1..1127: mol_type = other DNA; note = OR52A5
ggatccgccaccatgagccaccagatcctgctgctcctggccctgctgaccctaggcctggctgattacaaggacgacgacgataagatcgaattgatgaacgggaccgagggcccaaacttctacgtgcctttctccaacaagacgggcgtggtggaattcatgccgacattcaatggctcagtcttcatgccctctgcgtttatactaattgggattcctggtctggagtcagtgcagtgttggattgggattcctttctctgccatgtatcttattggtgtgattggaaattccctaattttagttataatcaaatatgaaaacagcctccatatacccatgtacatttttttggccatgttggcagccacagacattgcacttaacacctgcattcttcccaaaatgttaggcatcttctggtttcatttgccagagatttcttttgatgcctgtctttttcaaatgtggcttattcactcattccaggcaattgaatcgggtatccttctggcaatggccctggatcgctatgtggccatctgtatccccttgagacatgccaccatcttttcccagcagttcttaactcatattggacttggggtgacactcagggctgccattcttataataccttccttagggctcatcaaatgctgtctgaaacactatcgaactacagtcatctctcactcttactgtgagcacatggccatcgtgaagctggctactgaagatatccgagtcaacaagatatatggcctatttgttgcctttgcaatcctagggtttgacataatatttataaccttgtcctatgtccaaatttttatcactgtctttcagctgccccagaaggaggcacgattcaaggcctttaatacatgcattgcccacatttgtgtcttcctacagttctaccttcttgccttcttctctttcttcacacacaggtttggttcacacataccaccatatattcatatcctcttgtcaaatctttacctgttagtcccaccttttctcaaccctattgtctatggagtgaggaacaaacagattcgagatgccttaaagaggttgctaaagagaaagtgctgcaggagaaggtgagcggccgc

SEQ ID NO: 778 - DNA, 1124 bp, synthetic construct
  source 1..1124: mol_type = other DNA; note = OR52B2
ggatccgccaccatgagccaccagatcctgctgctcctggccctgctgaccctaggcctggctgattacaaggacgacgacgataagatcgaattgatgaacgggaccgagggcccaaacttctacgtgcctttctccaacaagacgggcgtggtggaattcatgagtcacaccaatgttaccatcttccatcctgcagtttttgtccttcctggcatccctgggttggaggcttatcacatttggctgtcaatacctctttgcctcatttacatcactgcagtcctgggaaacagcatcctgatagtggttattgtcatggaacgtaaccttcatgtgcccatgtatttcttcctctcaatgctggccgtcatggacatcctgctgtctaccaccactgtgcccaaggccctagccatcttttggcttcaagcacataacattgcttttgatgcctgtgtcacccaaggcttctttgtccatatgatgtttgtgggggagtcagctatcctgttagccatggcctttgatcgctttgtggccatttgtgccccactgagatatacaacagtgctaacatggcctgttgtggggaggattgctctggccgtcatcacccgaagcttctgcatcatcttcccagtcatattcttgctgaagcggctgcccttctgcctaaccaacattgttcctcactcctactgtgagcatattggagtggctcgtttagcctgtgctgacatcactgttaacatttggtatggcttctcagtgcccattgtcatggtcatcttggatgttatcctcatcgctgtgtcttactcactgatcctccgagcagtgtttcgtttgccctcccaggatgctcggcacaaggccctcagcacttgtggctcccacctctgtgtcatccttatgttttatgttccatccttctttaccttattgacccatcattttgggcgtaatattcctcaacatgtccatatcttgctggccaatctttatgtggcagtgccaccaatgctgaaccccattgtctatggtgtgaggaacaaacagattcgagatgccttaaagaggttgctaaagagaaagtgctgcaggagaaggtgagcggccgc

SEQ ID NO: 779 - DNA, 1124 bp, synthetic construct
  source 1..1124: mol_type = other DNA; note = OR52B4
ggatccgccaccatgagccaccagatcctgctgctcctggccctgctgaccctaggcctggctgattacaaggacgacgacgataagatcgaattgatgaacgggaccgagggcccaaacttctacgtgcctttctccaacaagacgggcgtggtggaattcatgcctactgtaaaccacagtggcactagccacacagtcttccacttgctgggcatccctggcctacaggaccagcacatgtggatttctatcccattcttcatttcctatgtcaccgcccttcttgggaacagcctgctcatcttcattatcctcacaaagcgcagcctccatgaacccatgtacctcttcctctgcatgctggctggagcagacattgtcctctccacgtgcaccattcctcaggccttagctatcttctggttccgtgctggggacatctccctggatcgttgcatcactcagctcttcttcatccattccaccttcatctctgagtcagggatcttgctggtgatggcctttgaccactatattgccatatgctacccactgaggtacaccaccattcttacaaatgctctgatcaagaaaatttgtgtgactgtctctctgagaagttatggtacaattttccctatcatatttcttttaaaaagattgactttctgccagaataatattattccacacaccttttgtgaacacattggcctagccaaatatgcatgtaatgacattcgaataaacatttggtatgggttttccattctaatgtcgacggtggtcttagatgttgtactaatttttatttcctatatgctgattctccatgctgtcttccacatgccttctccagatgcttgccacaaagctctcaacacatttggctcccatgtctgcatcatcatcctcttttatgggtctggcatcttcacaatccttacccagaggtttggacgccacattccaccttgtatccacatcccgttggctaatgtctgcattctggctccacctatgctgaatcccattatttatgggatcaggaacaaacagattcgagatgccttaaagaggttgctaaagagaaagtgctgcaggagaaggtgagcggccgc

SEQ ID NO: 780 - DNA, 1115 bp, synthetic construct
  source 1..1115: mol_type = other DNA; note = OR52B6(V267I)
ggatccgccaccatgagccaccagatcctgctgctcctggccctgctgaccctaggcctggctgattacaaggacgacgacgataagatcgaattgatgaacgggaccgagggcccaaacttctacgtgcctttctccaacaagacgggcgtggtggaattcatgaacaactctgacactcgcatagcaggctgcttcctcactggcatccctgggctggagcaactacatatctggctgtccatccccttctgcatcatgtacatcactgccctggaaggcaatggcatcctaatttgtgtcatcctctcccaggcaatcctgcatgagcccatgtacatattcttatctatgctggccagtgctgatgtcttgctctctaccaccaccatgcctaaggccctggccaatttgtggctaggttatagcctcatttcctttgatggctgcctcactcagatgttcttcattcacttcctcttcattcactctgctgtcctgctggccatggcctttgaccgctatgtggccatctgctcccccctgcgatatgtcacaatcctcacaagcaaggtcattgggaagatcgtcactgccgccctgagccacagcttcatcattatgtttccatccatctttctccttgagcacctgcactattgccagatcaatatcattgcacacacattttgtgagcacatgggcattgcccatctgtcctgttctgatatctccatcaatgtctggtatgggttggcagctgctcttctctccacaggcctagacatcatgcttattactgtttcctacatccacatcctccaagcagtcttccgcctcctttctcaagatgcccgctccaaggccctgagtacctgtggatcccatatctgtgtcatcctactcttctatgtccctgcgcttttttctgtctttgcctacaggtttggtgggagaagcatcccatgctatgtccatattctcctggccagcctctacgttgtcattcctcctatgctcaatcccgttatttatggagtgaggaacaaacagattcgagatgccttaaagaggttgctaaagagaaagtgctgcaggagaaggtgagcggccgc

SEQ ID NO: 781 - DNA, 1115 bp, synthetic construct
  source 1..1115: mol_type = other DNA; note = OR52B6(T36A,V267I)
ggatccgccaccatgagccaccagatcctgctgctcctggccctgctgaccctaggcctggctgattacaaggacgacgacgataagatcgaattgatgaacgggaccgagggcccaaacttctacgtgcctttctccaacaagacgggcgtggtggaattcatgaacaactctgacactcgcatagcaggctgcttcctcactggcatccctgggctggagcaactacatatctggctgtccatccccttctgcatcatgtacatcgctgccctggaaggcaatggcatcctaatttgtgtcatcctctcccaggcaatcctgcatgagcccatgtacatattcttatctatgctggccagtgctgatgtcttgctctctaccaccaccatgcctaaggccctggccaatttgtggctaggttatagcctcatttcctttgatggctgcctcactcagatgttcttcattcacttcctcttcattcactctgctgtcctgctggccatggcctttgaccgctatgtggccatctgctcccccctgcgatatgtcacaatcctcacaagcaaggtcattgggaagatcgtcactgccgccctgagccacagcttcatcattatgtttccatccatctttctccttgagcacctgcactattgccagatcaatatcattgcacacacattttgtgagcacatgggcattgcccatctgtcctgttctgatatctccatcaatgtctggtatgggttggcagctgctcttctctccacaggcctagacatcatgcttattactgtttcctacatccacatcctccaagcagtcttccgcctcctttctcaagatgcccgctccaaggccctgagtacctgtggatcccatatctgtgtcatcctactcttctatgtccctgcgcttttttctgtctttgcctacaggtttggtgggagaagcatcccatgctatgtccatattctcctggccagcctctacgttgtcattcctcctatgctcaatcccgttatttatggagtgaggaacaaacagattcgagatgccttaaagaggttgctaaagagaaagtgctgcaggagaaggtgagcggccgc

SEQ ID NO: 782 - DNA, 1130 bp, synthetic construct
  source 1..1130: mol_type = other DNA; note = OR52D1
ggatccgccaccatgagccaccagatcctgctgctcctggccctgctgaccctaggcctggctgattacaaggacgacgacgataagatcgaattgatgaacgggaccgagggcccaaacttctacgtgcctttctccaacaagacgggcgtggtggaattcatgtcagattccaacctcagtgataaccatcttccagacaccttcttcttaacagggatcccagggctggaggctgcccacttctggattgccatccctttctgtgccatgtatcttgtagcactggttggaaatgctgccctcatcctggtcattgccatggacaatgctcttcatgcacctatgtacctcttcctctgccttctctcactcacagacctggctctcagttctaccactgtgcccaagatgctggccattttgtggctccatgctggtgagatttcctttggtggatgcctggcccagatgttttgtgtccattctatctatgctctggagtcctcaattctacttgccatggcctttgataggtatgtggctatctgtaacccattaaggtacacaaccattctcaaccatgctgtcataggcagaattggctttgttgggctattccgtagtgtggctattgtctcccccttcatcttcttgctgaggcgactcccctactgtggtcaccgtgtcatgacacacacatactgtgagcatatgggcattgcccgactggcctgtgccaacatcactgtcaatattgtctatgggctaactgtggctctgctggccatgggactggattccattctcattgccatttcctatggctttatcctccatgcagtctttcatcttccatctcatgatgcccagcacaaagctctgagtacctgtggctcccacattggcatcatcctggttttctacatccctgccttcttctccttcctcacccaccgctttggtcaccacgaagtccccaagcatgtgcacatctttctggctaatctctatgtgctggtgcctcctgtactcaatcctattctctatggagctaggaacaaacagattcgagatgccttaaagaggttgctaaagagaaagtgctgcaggagaaggtgagcggccgc

SEQ ID NO: 783 - DNA, 1121 bp, synthetic construct
  source 1..1121: mol_type = other DNA; note = OR52E2(N5S)
ggatccgccaccatgagccaccagatcctgctgctcctggccctgctgaccctaggcctggctgattacaaggacgacgacgataagatcgaattgatgaacgggaccgagggcccaaacttctacgtgcctttctccaacaagacgggcgtggtggaattcatgttccttcccagtgacacccagtttcacccctcctccttcctgttgctggggatcccaggactagaaacacttcacatctggatcggctttcccttctgtgctgtgtacatgatcgcactcatagggaacttcactattctacttgtgatcaagactgacagcagcctacaccagcccatgttctacttcctggccatgttggccaccactgatgtgggtctctcaacagctaccatccctaagatgcttggaatcttctggatcaacctcagagggatcatctttgaagcctgcctcacccagatgttttttatccacaacttcacacttatggagtcagcagtccttgtggcaatggcttatgacagctatgtggccatctgcaatccactccaatatagcgccatcctcaccaacaaggttgtttctgtgattggtcttggtgtgtttgtgagggctttaattttcgtcattccctctatacttcttatattgcggttgcccttctgtgggaatcatgtaattccccacacctactgtgagcacatgggtcttgctcatctatcttgtgccagcatcaaaatcaatattatttatggtttatgtgccatttgtaatctagtgtttgacatcacagtcattgccctttcttatgtgcatattctttgtgctgttttccgtcttcctactcatgaagcccgactcaagtccctcagcacatgtggttcacatgtgtgtgtaatccttgccttctatacaccagccctcttttcctttatgactcatcgctttggccgaaatgtgccccgctatatccatatactcctagccaatctctatgttgtggtgccaccaatgctcaatcctgtcatatatggagtcaggaacaaacagattcgagatgccttaaagaggttgctaaagagaaagtgctgcaggagaaggtgagcggccgc

SEQ ID NO: 784 - DNA, 1121 bp, synthetic construct
  source 1..1121: mol_type = other DNA; note = OR52E2(H174R,R264C)
ggatccgccaccatgagccaccagatcctgctgctcctggccctgctgaccctaggcctggctgattacaaggacgacgacgataagatcgaattgatgaacgggaccgagggcccaaacttctacgtgcctttctccaacaagacgggcgtggtggaattcatgttccttcccaatgacacccagtttcacccctcctccttcctgttgctggggatcccaggactagaaacacttcacatctggatcggctttcccttctgtgctgtgtacatgatcgcactcatagggaacttcactattctacttgtgatcaagactgacagcagcctacaccagcccatgttctacttcctggccatgttggccaccactgatgtgggtctctcaacagctaccatccctaagatgcttggaatcttctggatcaacctcagagggatcatctttgaagcctgcctcacccagatgttttttatccacaacttcacacttatggagtcagcagtccttgtggcaatggcttatgacagctatgtggccatctgcaatccactccaatatagcgccatcctcaccaacaaggttgtttctgtgattggtcttggtgtgtttgtgagggctttaattttcgtcattccctctatacttcttatattgcggttgcccttctgtgggaatcgtgtaattccccacacctactgtgagcacatgggtcttgctcatctatcttgtgccagcatcaaaatcaatattatttatggtttatgtgccatttgtaatctagtgtttgacatcacagtcattgccctttcttatgtgcatattctttgtgctgttttccgtcttcctactcatgaagcccgactcaagtccctcagcacatgtggttcacatgtgtgtgtaatccttgccttctatacaccagccctcttttcctttatgactcattgctttggccgaaatgtgccccgctatatccatatactcctagccaatctctatgttgtggtgccaccaatgctcaatcctgtcatatatggagtcaggaacaaacagattcgagatgccttaaagaggttgctaaagagaaagtgctgcaggagaaggtgagcggccgc

SEQ ID NO: 785 - DNA, 1121 bp, synthetic construct
  source 1..1121: mol_type = other DNA; note = OR52E4
ggatccgccaccatgagccaccagatcctgctgctcctggccctgctgaccctaggcctggctgattacaaggacgacgacgataagatcgaattgatgaacgggaccgagggcccaaacttctacgtgcctttctccaacaagacgggcgtggtggaattcatgccttctatcaatgacacccacttctatccccccttcttcctcctgctaggaataccaggactggacactttacatatctggatttctttcccattctgtattgtgtacctgattgccattgtggggaatatgaccattctctttgtgatcaaaactgaacatagtctacaccagcccatgttctacttcctggccatgttgtctatgattgatctgggtctgtccacatccactatccccaaaatgctaggaatcttctggttcaacctccaagagatcagctttgggggatgccttcttcagatgttctttattcacatgtttacaggcatggagactgttctgttggtggtcatggcttatgaccgctttgttgccatctgcaaccctctccagtacaccatgatcctcaccaataaaaccatcagtatcctagcttctgtggttgttggaagaaatttagttcttgtaaccccatttgtgtttctcattctgcgtctgccattctgtgggcataacatcgtacctcacacatactgtgagcacaggggtctggccgggttggcctgtgcacccattaagatcaacataatctatgggctcatggtgatttcttatattattgtggatgtgatcttaattgcctcttcctatgtgcttatccttagagctgtttttcgccttccctctcaagatgtccgactaaaggccttcaatacctgtggttctcatgtctgtgttatgctgtgcttttacacaccagcatttttttcttttatgacacatcgttttggccaaaacattccccactatatccatattcttttggctaacctgtatgtggttgtcccacctgcccttaaccctgtcatttatggagtcaggaacaaacagattcgagatgccttaaagaggttgctaaagagaaagtgctgcaggagaaggtgagcggccgc

SEQ ID NO: 786 - DNA, 1121 bp, synthetic construct
  source 1..1121: mol_type = other DNA; note = OR52E4(V176I,R184M)
ggatccgccaccatgagccaccagatcctgctgctcctggccctgctgaccctaggcctggctgattacaaggacgacgacgataagatcgaattgatgaacgggaccgagggcccaaacttctacgtgcctttctccaacaagacgggcgtggtggaattcatgccttctatcaatgacacccacttctatccccccttcttcctcctgctaggaataccaggactggacactttacatatctggatttctttcccattctgtattgtgtacctgattgccattgtggggaatatgaccattctctttgtgatcaaaactgaacatagtctacaccagcccatgttctacttcctggccatgttgtctatgattgatctgggtctgtccacatccactatccccaaaatgctaggaatcttctggttcaacctccaagagatcagctttgggggatgccttcttcagatgttctttattcacatgtttacaggcatggagactgttctgttggtggtcatggcttatgaccgctttgttgccatctgcaaccctctccagtacaccatgatcctcaccaataaaaccatcagtatcctagcttctgtggttgttggaagaaatttagttcttgtaaccccatttgtgtttctcattctgcgtctgccattctgtgggcataacatcatacctcacacatactgtgagcacatgggtctggccgggttggcctgtgcacccattaagatcaacataatctatgggctcatggtgatttcttatattattgtggatgtgatcttaattgcctcttcctatgtgcttatccttagagctgtttttcgccttccctctcaagatgtccgactaaaggccttcaatacctgtggttctcatgtctgtgttatgctgtgcttttacacaccagcatttttttcttttatgacacatcgttttggccaaaacattccccactatatccatattcttttggctaacctgtatgtggttgtcccacctgcccttaaccctgtcatttatggagtcaggaacaaacagattcgagatgccttaaagaggttgctaaagagaaagtgctgcaggagaaggtgagcggccgc

SEQ ID NO: 787 - DNA, 1115 bp, synthetic construct
  source 1..1115: mol_type = other DNA; note = OR52E5(P234L)
ggatccgccaccatgagccaccagatcctgctgctcctggccctgctgaccctaggcctggctgattacaaggacgacgacgataagatcgaattgatgaacgggaccgagggcccaaacttctacgtgcctttctccaacaagacgggcgtggtggaattcatgcttcataccaacaatacacagtttcacccttccaccttcctcgtagtgggggtcccagggctggaagatgtgcatgtatggattggcttccccttctttgcagtgtatctaacagcccttctagggaacatcattatcctgtttgtgatacagactgaacagagcctccaccaacccatgttttacttcctagccatgttggccggcactgatctgggcttgtctacagcaaccatccccaagatgctgggaattttctggtttaatcttggagagattgcatttggtgcctgcatcacacagatgtataccattcatatatgcactggcctggagtctgtggtactgacagtcacgggcatagatcgctatattgccatctgcaaccccctgagatatagcatgatccttaccaacaaggtaatagccattctgggcatagtcatcattgtcaggactttggtatttgtgactccattcacatttctcatcctgagattgcctttctgtggtgtccggattatccctcatacctattgtgaacacatgggcttggcaaagttagcttgtgccagtattaatgttatatatggattgattgccttctcagtgggatacattgacatttctgtgattggattttcctatgtccagatcctccgagctgtcttccatctcccagcctgggatgcccggcttaaggcactcagcacatgtggctctcacgtctgtgttatgttggctttctacctgccagccctcttttccttcatgacacaccgctttggccacaacatccctcattacatccacattcttctggccaatctgtatgtggtttttccccctgctcttaactctgttatctatggggtcaggaacaaacagattcgagatgccttaaagaggttgctaaagagaaagtgctgcaggagaaggtgagcggccgc

SEQ ID NO: 788 - DNA, 1121 bp, synthetic construct
  source 1..1121: mol_type = other DNA; note = OR52E6
ggatccgccaccatgagccaccagatcctgctgctcctggccctgctgaccctaggcctggctgattacaaggacgacgacgataagatcgaattgatgaacgggaccgagggcccaaacttctacgtgcctttctccaacaagacgggcgtggtggaattcatgcctatagctaacgacacccagttccatacttcttcattcctactgctgggtatcccagggctagaagatgtgcacatctggattggattcccttttttctctgtgtatcttattgcactcctgggaaatgctgctatcttctttgtgatccaaactgagcagagtctccatgagcccatgtactactgcctggccatgttggattccattgacctgagcttgtctacggccaccattcccaaaatgctgggcatcttctggttcaatatcaaggaaatatcttttggaggctacctttctcagatgttcttcatccatttcttcactgtcatggagagcatcgtattggtggccatggcctttgaccgctacattgccatttgcaaacctctttggtacaccatgatcctcaccagcaaaatcatcagcctcattgcaggcattgctgtcctgaggagcttgtacatggtcattccactggtgtttctcctcttaaggttgcccttctgtggacatcgtatcatccctcatacttactgtgagcacatgggcattgcccgtctggcctgtgccagcatcaaagtcaacattatgtttggtcttggcagtatttctctcttgttattggatgtgctccttattattctctcccatatcaggatcctctatgctgtcttctgcctgccctcctgggaagctcgactcaaagctctcaacacctgtggctctcacattggtgttatcttagccttttctacaccagcatttttctctttctttacacactgctttggccatgatattccccaatatatccacattttcttggctaatctatatgtggttgttcctcccaccctcaatcctgtaatctatggggtcaggaacaaacagattcgagatgccttaaagaggttgctaaagagaaagtgctgcaggagaaggtgagcggccgc

SEQ ID NO: 789 - DNA, 1121 bp, synthetic construct
  source 1..1121: mol_type = other DNA; note = OR52E6 (var2)
ggatccgccaccatgagccaccagatcctgctgctcctggccctgctgaccctaggcctggctgattacaaggacgacgacgataagatcgaattgatgaacgggaccgagggcccaaacttctacgtgcctttctccaacaagacgggcgtggtggaattcatgcctatagctaacgacacccagttccatacttcttcattcctactgctgggtatcccagggctagaagatgtgcacatctggattggattcccttttttctctgtgtatcttgttgcactcctgggaaatgctgctatcctctttgtgatccaaactgagcagagtctccatgagcccatgtactacttcctggccatgttggattccattgacctgagcttgtctacggccaccattcccaaaatgctgggcatcttctggttcaatatcaaggaaataccttttggaggctacctttctcagatgttcttcatccatttcttcactgtcatggagagcatcgtattggtggccatggcctttgaccgctacattgccatttgcaaacctcttaggtacaccatgatcctcaccagcaaaatcatcagcctcattgcaggcattgctgtcctgaggagcttgtacatggtcgttccactggtgtttctcctcttaaggttgcccttctgtggacatcgtatcatccctcatacttactgtgagcacatgggcattgcccgtctggcctgtgccagcatcaaagtcaacattaggtttggtcttggcagtatttctctcttgttattggatgtgctccttattattctctcccatatcaggatcctctatgctgtcttctgcctgccctcctgggaagctcgactcaaagctctcaacacctgtggctctcacattggtgttatcttagccttttctacaccagcatttttctctttctttacacactgctttggccatgatattccccaatatatccacattttcttggctaatctatatgtggttgttcctcccaccctcaatcctgtaatctatggggtcaggaacaaacagattcgagatgccttaaagaggttgctaaagagaaagtgctgcaggagaaggtgagcggccgc

SEQ ID NO: 790 - DNA, 1121 bp, synthetic construct
  source 1..1121: mol_type = other DNA; note = OR52E8
ggatccgccaccatgagccaccagatcctgctgctcctggccctgctgaccctaggcctggctgattacaaggacgacgacgataagatcgaattgatgaacgggaccgagggcccaaacttctacgtgcctttctccaacaagacgggcgtggtggaattcatgtctacgtctaatcacacccagttccatccttcttcattcctactgctgggtatcccagggctagaagatgtgcacatttggattggagtcccttttttctttgtgtatcttgttgcactcctgggaaacactgctctcttgtttgtgatccagactgagcagagtctccatgagcctatgtactacttcctggccatgttggattccattgacctgggcttgtctacagccaccatccccaaaatgttgggcatcttctggttcaataccaaagaaatatcttttggaggctgcctttctcacatgttcttcatccatttcttcactgctatggagagcattgtgttggtggccatggcctttgaccgctacattgccatttgcaaacctcttcggtacaccatgatcctcaccagcaaaatcatcagcctcattgcaggcattgctgtcctgaggagcctgtacatggttgttccactggtgtttctccttctgaggctgcccttctgtgggcatcgtatcatccctcatacttattgtgagcacatgggcattgcccgtctggcctgtgccagcatcaaagtcaacattaggtttggccttggcaacatatctctcttgttactggatgttatccttattattctctcctatgtcaggatcctgtatgctgtcttctgcctgccctcctgggaagctcgactcaaagctctcaacacctgtggttctcatattggtgttatcttagccttttttacaccagcatttttttcattcttgacacatcgttttggccataatatcccacagtatatacatattatattagccaacctgtatgtggttgtcccaccagccctcaatcctgtaatctatggagtcaggaacaaacagattcgagatgccttaaagaggttgctaaagagaaagtgctgcaggagaaggtgagcggccgc

SEQ ID NO: 791 - DNA, 1124 bp, synthetic construct
  source 1..1124: mol_type = other DNA; note = OR52H1(H124R)
ggatccgccaccatgagccaccagatcctgctgctcctggccctgctgaccctaggcctggctgattacaaggacgacgacgataagatcgaattgatgaacgggaccgagggcccaaacttctacgtgcctttctccaacaagacgggcgtggtggaattcatgatcattttcaacctgagcagttacaatccaggacccttcattctggtagggatcccaggcctggagcaattccatgtgtggattggaattcccttctgtatcatctacattgtagctgttgtgggaaactgcatccttctctacctcattgtggtggagcatagtcttcatgaacccatgttcttctttctctccatgctggccatgactgacctcatcttgtccacagctggtgtgcctaaagcactcagtatcttttggctaggggctcgcgaaatcacattcccaggatgccttacacaaatgttcttccttcactataactttgtcctggattcagccattctgatggccatggcatttgatcgctatgtagctatctgttctcccttgagatataccaccatcttgactcccaagaccatcatcaagagtgctatgggcatctcctttcgaagcttctgcatcatcctgccagatgtattcttgctgacatgcctgcctttctgcaggacacgcatcataccccacacatactgtgagcatataggtgttgcccagctcgcctgtgctgatatctccatcaacttctggtatggcttttgtgttcccatcatgacggtcatctcagatgtgattctcattgctgtttcctacgcacacatcctctgtgctgtctttggccttccctcccaagatgcctgccagaaagccctcggcacttgtggttctcatgtctgtgtcatcctcatgttttatacacctgcctttttctccatcctcgcccatcgctttggacacaatgtctctcgcaccttccacatcatgtttgccaatctctacattgttatcccacctgcactcaaccccatggtttacggagtgaggaacaaacagattcgagatgccttaaagaggttgctaaagagaaagtgctgcaggagaaggtgagcggccgc

SEQ ID NO: 792 - DNA, 1124 bp, synthetic construct
  source 1..1124: mol_type = other DNA; note = OR52H1(A83T,H124R,G229C)
ggatccgccaccatgagccaccagatcctgctgctcctggccctgctgaccctaggcctggctgattacaaggacgacgacgataagatcgaattgatgaacgggaccgagggcccaaacttctacgtgcctttctccaacaagacgggcgtggtggaattcatgatcattttcaacctgagcagttacaatccaggacccttcattctggtagggatcccaggcctggagcaattccatgtgtggattggaattcccttctgtatcatctacattgtagctgttgtgggaaactgcatccttctctacctcattgtggtggagcatagtcttcatgaacccatgttcttctttctctccatgctggccatgactgacctcatcttgtccacagctggtgtgcctaaaacactcagtatcttttggctaggggctcgcgaaatcacattcccaggatgccttacacaaatgttcttccttcactataactttgtcctggattcagccattctgatggccatggcatttgatcgctatgtagctatctgttctcccttgagatataccaccatcttgactcccaagaccatcatcaagagtgctatgggcatctcctttcgaagcttctgcatcatcctgccagatgtattcttgctgacatgcctgcctttctgcaggacacgcatcataccccacacatactgtgagcatataggtgttgcccagctcgcctgtgctgatatctccatcaacttctggtatggcttttgtgttcccatcatgacggtcatctcagatgtgattctcattgctgtttcctacgcacacatcctctgtgctgtcttttgccttccctcccaagatgcctgccagaaagccctcggcacttgtggttctcatgtctgtgtcatcctcatgttttatacacctgcctttttctccatcctcgcccatcgctttggacacaatgtctctcgcaccttccacatcatgtttgccaatctctacattgttatcccacctgcactcaaccccatggtttacggagtgaggaacaaacagattcgagatgccttaaagaggttgctaaagagaaagtgctgcaggagaaggtgagcggccgc

SEQ ID NO: 793 - DNA, 1133 bp, synthetic construct
  source 1..1133: mol_type = other DNA; note = OR52I1(T41I)
ggatccgccaccatgagccaccagatcctgctgctcctggccctgctgaccctaggcctggctgattacaaggacgacgacgataagatcgaattgatgaacgggaccgagggcccaaacttctacgtgcctttctccaacaagacgggcgtggtggaattcatgctgggtccagcttacaaccacacaatggaaacccctgcctccttcctccttgtgggtatcccaggactgcaatcttcacatctttggctggctatctcactgagtgccatgtacatcatagccctgttaggaaacaccctcatcgtgactgcaatctggatggattccactcggcatgagcccatgtattgctttctgtgtgttctggctgctgtggacattgttatggcctcctccgtggtacccaagatggtgagcatcttctgctcgggagacagctccatcagctttagtgcttgtttcactcagatgttttttgtccacttagccacagctgtggagacggggctgctgctgaccatggcttttgaccgctatgtagccatctgcaagcctctacactacaagagaattctcacgcctcaagtgatgctgggaatgagtatggccgtcaccatcagagctgtcacattcatgactccactgagttggatgatgaatcatctacctttctgtggctccaatgtggttgtccactcctactgtaagcacatagctttggccaggttagcatgtgctgaccccgtgcccagcagtctctacagtctgattggttcctctcttatggtgggctctgatgtggccttcattgctgcctcctatatcttaattctcagggcagtatttgatctctcctcaaagactgctcagttgaaagcattaagcacatgtggctcccatgtgggggttatggctttgtactatctacctgggatggcatccatctatgcggcctggttggggcaggatatagtgcccttgcacacccaagtgctgctagctgacctgtacgtgatcatcccagccactttaaatcccatcatctatggcatgaggaacaaacagattcgagatgccttaaagaggttgctaaagagaaagtgctgcaggagaaggtgagcggccgc

SEQ ID NO: 794 - DNA, 1133 bp, synthetic construct
  source 1..1133: mol_type = other DNA; note = OR52I2
ggatccgccaccatgagccaccagatcctgctgctcctggccctgctgaccctaggcctggctgattacaaggacgacgacgataagatcgaattgatgaacgggaccgagggcccaaacttctacgtgcctttctccaacaagacgggcgtggtggaattcatgctgggtccagcttataaccacacaatggaaacccctgcctccttcctccttgtgggtatcccaggactgcaatcttcacatctttggctggctatctcactgagtgccatgtacatcatagccctgttaggaaacaccatcatcgtgactgcaatctggatggattccactcggcatgagcccatgtattgctttctgtgtgttctggctgctgtggacattgttatggcctcctcggtggtacccaagatggtgagcatcttctgctcaggagacagctcaatcagctttagtgcttgtttcactcagatgttttttgtccacttagccacagctgtggagacggggctgctgctgaccatggcttttgaccgctatgtagccatctgcaagcctctacactacaagagaattctcacgcctcaagtgatgctgggaatgagtatggccatcaccatcagagctatcatagccataactccactgagttggatggtgagtcatctacctttctgtggctccaatgtggttgtccactcctactgtgagcacatagctttggccaggttagcatgtgctgaccccgtgcccagcagtctctacagtctgattggttcctctcttatggtgggctctgatgtggccttcattgctgcctcctatatcttaattctcaaggcagtatttggtctctcctcaaagactgctcagttgaaagcattaagcacatgtggctcccatgtgggggttatggctttgtactatctacctgggatggcatccatctatgcggcctggttggggcaggatgtagtgcccttgcacacccaagtcctgctagctgacctgtacgtgatcatcccagccaccttaaatcccatcatctatggcatgaggaacaaacagattcgagatgccttaaagaggttgctaaagagaaagtgctgcaggagaaggtgagcggccgc

SEQ ID NO: 795 - DNA, 1133 bp, synthetic construct
  source 1..1133: mol_type = other DNA; note = OR52I2(T141M)
ggatccgccaccatgagccaccagatcctgctgctcctggccctgctgaccctaggcctggctgattacaaggacgacgacgataagatcgaattgatgaacgggaccgagggcccaaacttctacgtgcctttctccaacaagacgggcgtggtggaattcatgctgggtccagcttataaccacacaatggaaacccctgcctccttcctccttgtgggtatcccaggactgcaatcttcacatctttggctggctatctcactgagtgccatgtacatcatagccctgttaggaaacaccatcatcgtgactgcaatctggatggattccactcggcatgagcccatgtattgctttctgtgtgttctggctgctgtggacattgttatggcctcctcggtggtacccaagatggtgagcatcttctgctcaggagacagctcaatcagctttagtgcttgtttcactcagatgttttttgtccacttagccacagctgtggagacggggctgctgctgaccatggcttttgaccgctatgtagccatctgcaagcctctacactacaagagaattctcatgcctcaagtgatgctgggaatgagtatggccatcaccatcagagctatcatagccataactccactgagttggatggtgagtcatctacctttctgtggctccaatgtggttgtccactcctactgtgagcacatagctttggccaggttagcatgtgctgaccccgtgcccagcagtctctacagtctgattggttcctctcttatggtgggctctgatgtggccttcattgctgcctcctatatcttaattctcaaggcagtatttggtctctcctcaaagactgctcagttgaaagcattaagcacatgtggctcccatgtgggggttatggctttgtactatctacctgggatggcatccatctatgcggcctggttggggcaggatgtagtgcccttgcacacccaagtcctgctagctgacctgtacgtgatcatcccagccaccttaaatcccatcatctatggcatgaggaacaaacagattcgagatgccttaaagaggttgctaaagagaaagtgctgcaggagaaggtgagcggccgc

SEQ ID NO: 796 - DNA, 1121 bp, synthetic construct
  source 1..1121: mol_type = other DNA; note = OR52J3
ggatccgccaccatgagccaccagatcctgctgctcctggccctgctgaccctaggcctggctgattacaaggacgacgacgataagatcgaattgatgaacgggaccgagggcccaaacttctacgtgcctttctccaacaagacgggcgtggtggaattcatgttttatcacaacaagagcatatttcacccagtcacatttttcctcattggaatcccaggtctggaagacttccacatgtggatctccgggcctttctgctctgtttaccttgtggctttgctgggcaatgccaccattctgctagtcatcaaggtagaacagactctccgggagcccatgttctacttcctggccattctttccactattgatttggccctttctacaacctctgtgcctcgcatgctgggtatcttctggtttgatgctcacgagattaactatggagcttgtgtggcccagatgtttctgatccatgccttcactggcatggaggctgaggtcttactggctatggcttttgaccgttatgtggccgtctgtgctccactacattacgcaaccatcttgacatcccaagtgttggtgggcattagcatgtgcattgtaattcgtcccgttttacttacacttcccatggtctatcttatctaccgcctacccttttgtcaggctcacataatagcccattcctactgtgagcacatgggcattgcaaaattgtcctgtggaaacattcgtatcaatggtatctatgggctttttgtagtttctttctttgttctgaacctggtgctcattggcatctcgtatgtttacattctccgtgctgtcttccgcctcccatcacatgatgctcagctaaaagccctaagcacgtgtggcgctcatgttggagtcatctgtgttttctatatcccttcagtcttctctttccttactcatcgatttggacaccaaataccaggttacattcacattcttgttgccaatctctatttgattatcccaccctctctcaaccccatcatttatggggtgaggaacaaacagattcgagatgccttaaagaggttgctaaagagaaagtgctgcaggagaaggtgagcggccgc

SEQ ID NO: 797 - DNA, 1121 bp, synthetic construct
  source 1..1121: mol_type = other DNA; note = OR52J3(T77A,V128I,Q141L)
ggatccgccaccatgagccaccagatcctgctgctcctggccctgctgaccctaggcctggctgattacaaggacgacgacgataagatcgaattgatgaacgggaccgagggcccaaacttctacgtgcctttctccaacaagacgggcgtggtggaattcatgttttatcacaacaagagcatatttcacccagtcacatttttcctcattggaatcccaggtctggaagacttccacatgtggatctccgggcctttctgctctgtttaccttgtggctttgctgggcaatgccaccattctgctagtcatcaaggtagaacagactctccgggagcccatgttctacttcctggccattctttccactattgatttggccctttctgcaacctctgtgcctcgcatgctgggtatcttctggtttgatgctcacgagattaactatggagcttgtgtggcccagatgtttctgatccatgccttcactggcatggaggctgaggtcttactggctatggcttttgaccgttatgtggccatctgtgctccactacattacgcaaccatcttgacatccctagtgttggtgggcattagcatgtgcattgtaattcgtcccgttttacttacacttcccatggtctatcttatctaccgcctacccttttgtcaggctcacataatagcccattcctactgtgagcacatgggcattgcaaaattgtcctgtggaaacattcgtatcaatggtatctatgggctttttgtagtttctttctttgttctgaacctggtgctcattggcatctcgtatgtttacattctccgtgctgtcttccgcctcccatcacatgatgctcagctaaaagccctaagcacgtgtggcgctcatgttggagtcatctgtgttttctatatcccttcagtcttctctttccttactcatcgatttggacaccaaataccaggttacattcacattcttgttgccaatctctatttgattatcccaccctctctcaaccccatcatttatggggtgaggaacaaacagattcgagatgccttaaagaggttgctaaagagaaagtgctgcaggagaaggtgagcggccgc

SEQ ID NO: 798 - DNA, 1124 bp, synthetic construct
  source 1..1124: mol_type = other DNA; note = OR52K1
ggatccgccaccatgagccaccagatcctgctgctcctggccctgctgaccctaggcctggctgattacaaggacgacgacgataagatcgaattgatgaacgggaccgagggcccaaacttctacgtgcctttctccaacaagacgggcgtggtggaattcatgcttccctctaatatcacctcaacacatccagctgtctttttgttggtaggaattcctggtttggaacacctgcatgcctggatctccatccccttctgctttgcttatactctggccctgctaggcaactgtacccttctcttcattatccaggctgatgcagccctccatgaacccatgtacctctttctggccatgttggcaaccattgacttggttctttcttctacaacgctgcccaaaatgcttgccatattctggttcagggatcaggagatcaacttctttgcctgtctggtccagatgttcttccttcactccttctccatcatggagtcagcagtgctgctggccatggcctttgaccgctatgtggccatctgcaagccattgcactacacgacggtcctgactgggtccctcatcaccaagattggcatggctgctgtggcccgggctgtgacactaatgactccactccccttcctgctcagacgcttccactactgccgaggcccagtgattgcccattgctactgtgaacacatggctgtggtaaggctggcgtgtggggacactagcttcaacaatatctatggcattgctgtggccatgtttattgtggtgttggacctgctctttgttatcctgtcttatgtcttcatccttcaggcagttctccagcttgcctctcaggaggcccgctacaaggcatttgggacatgtgtgtctcacataggtgccatcctgtccacctacactccagtagtcatctcttcagtcatgcaccgtgtagcccgccatgctgcccctcgtgtccacatactccttgctattttctatctccttttcccacccatggtcaatcctatcatatatggagtcaggaacaaacagattcgagatgccttaaagaggttgctaaagagaaagtgctgcaggagaaggtgagcggccgc

SEQ ID NO: 799 - DNA, 1124 bp, synthetic construct
  source 1..1124: mol_type = other DNA; note = OR52K1(Q52R)
ggatccgccaccatgagccaccagatcctgctgctcctggccctgctgaccctaggcctggctgattacaaggacgacgacgataagatcgaattgatgaacgggaccgagggcccaaacttctacgtgcctttctccaacaagacgggcgtggtggaattcatgcttccctctaatatcacctcaacacatccagctgtctttttgttggtaggaattcctggtttggaacacctgcatgcctggatctccatccccttctgctttgcttatactctggccctgctaggcaactgtacccttctcttcattatccgggctgatgcagccctccatgaacccatgtacctctttctggccatgttggcaaccattgacttggttctttcttctacaacgctgcccaaaatgcttgccatattctggttcagggatcaggagatcaacttctttgcctgtctggtccagatgttcttccttcactccttctccatcatggagtcagcagtgctgctggccatggcctttgaccgctatgtggccatctgcaagccattgcactacacgacggtcctgactgggtccctcatcaccaagattggcatggctgctgtggcccgggctgtgacactaatgactccactccccttcctgctcagacgcttccactactgccgaggcccagtgattgcccattgctactgtgaacacatggctgtggtaaggctggcgtgtggggacactagcttcaacaatatctatggcattgctgtggccatgtttattgtggtgttggacctgctctttgttatcctgtcttatgtcttcatccttcaggcagttctccagcttgcctctcaggaggcccgctacaaggcatttgggacatgtgtgtctcacataggtgccatcctgtccacctacactccagtagtcatctcttcagtcatgcaccgtgtagcccgccatgctgcccctcgtgtccacatactccttgctattttctatctccttttcccacccatggtcaatcctatcatatatggagtcaggaacaaacagattcgagatgccttaaagaggttgctaaagagaaagtgctgcaggagaaggtgagcggccgc

SEQ ID NO: 800 - DNA, 1124 bp, synthetic construct
  source 1..1124: mol_type = other DNA; note = OR52K2
ggatccgccaccatgagccaccagatcctgctgctcctggccctgctgaccctaggcctggctgattacaaggacgacgacgataagatcgaattgatgaacgggaccgagggcccaaacttctacgtgcctttctccaacaagacgggcgtggtggaattcatgtcagcctccaatatcaccttaacacatccaactgccttcttgttggtggggattccaggcctggaacacctgcacatctggatctccatccctttctgcttagcatatacactggccctgcttggaaactgcactctccttctcatcatccaggctgatgcagccctccatgaacccatgtacctctttctggccatgttggcagccatcgacctggtcctttcctcctcagcactgcccaaaatgcttgccatattctggttcagggatcgggagataaacttctttgcctgtctggcccagatgttcttccttcactccttctccatcatggagtcagcagtgctgctggccatggcctttgaccgctatgtggctatctgcaagccactgcactacaccaaggtcctgactgggtccctcatcaccaagattggcatggctgctgtggcccgggctgtgacactaatgactccactccccttcctgctgagatgtttccactactgccgaggcccagtgatcgctcactgctactgtgaacacatggctgtggtgaggctggcgtgtggggacactagcttcaacaatatctatggcatcgctgtggccatgtttattgtggtgttggacctgctccttgttatcctgtcttatatctttattcttcaggcagttctactgcttgcctctcaggaggcccgctacaaggcatttgggacatgtgtctctcatataggtgccatcttagccttctacacaactgtggtcatctcttcagtcatgcaccgtgtagcccgccatgctgcccctcatgtccacatcctccttgccaatttctatctgctcttcccacccatggtcaatcccataatctatggtgtcaggaacaaacagattcgagatgccttaaagaggttgctaaagagaaagtgctgcaggagaaggtgagcggccgc

SEQ ID NO: 801 - DNA, 1127 bp, synthetic construct
  source 1..1127: mol_type = other DNA; note = OR52L1(C125R,C146R,K168T,W282R)
ggatccgccaccatgagccaccagatcctgctgctcctggccctgctgaccctaggcctggctgattacaaggacgacgacgataagatcgaattgatgaacgggaccgagggcccaaacttctacgtgcctttctccaacaagacgggcgtggtggaattcatgctccttagcaattcaagctggaggctatcccagccttcttttctcctggtagggattccaggtttagaggaaagccagcactggattgcactgcccctgggcatcctttacctccttgctttagtgggcaatgttaccattctcttcatcatctggatggacccatccttgcaccaatctatgtacctcttcctgtccatgctagctgccatcgacctggttctggcctcctccactgcacccaaagcccttgcagtgctcctggttcatgcccacgagattgggtacatcgtctgcctgatccagatgttcttcatccatgcattctcctccatggagtcaggggtacttgtggccatggctctggatcgctatgtagccatttgtcaccccttgcaccattccacaatcctgcatccaggggtcatagggcgcatcggaatggtggtgctggtgaggggattactactccttatccccttccccattttgttgggaacacttatcttctgccaagccaccatcataggccatgcctattgtgaacatatggctgttgtgaaacttgcctgctcagaaaccacagtcaatcgagcttatgggctgactatggccttgcttgtgattgggctggatgttctggccattggtgtttcctatgcccacatcctccaggcagtgctgaaggtaccagggagtgaggcccgacttaaggcgtttagcacatgtggctctcatatttgtgtcatcctggtcttctatgtccctggaattttctccttcctcactcaccgctttggtcatcatgtaccccatcatgtccatgttcttctggccacaaggtatctcctcatgccacctgcgctcaatcctcttgtctatggagtgaggaacaaacagattcgagatgccttaaagaggttgctaaagagaaagtgctgcaggagaaggtgagcggccgc

SEQ ID NO: 802 - DNA, 1127 bp, synthetic construct
  source 1..1127: mol_type = other DNA; note = OR52M1
ggatccgccaccatgagccaccagatcctgctgctcctggccctgctgaccctaggcctggctgattacaaggacgacgacgataagatcgaattgatgaacgggaccgagggcccaaacttctacgtgcctttctccaacaagacgggcgtggtggaattcatgctcacttttcataatgtctgctcagtacccagctccttctggctcactggcatcccagggctggagtccctacacgtctggctctccatcccctttggctccatgtacctggtggctgtggtggggaatgtgaccatcctggctgtggtaaagatagaacgcagcctgcaccagcccatgtactttttcttgtgcatgttggctgccattgacctggttctgtctacttccactatacccaaacttctgggaatcttctggttcggtgcttgtgacattggcctggacgcctgcttgggccaaatgttccttatccactgctttgccactgttgagtcaggcatcttccttgccatggcttttgatcgctacgtggccatctgcaacccactacgtcatagcatggtgctcacttatacagtggtgggtcgtttggggcttgtttctctcctccggggtgttctctacattggacctctgcctctgatgatccgcctgcggctgcccctttataaaacccatgttatctcccactcctactgtgagcacatggctgtagttgccttgacatgtggcgacagcagggtcaataatgtctatgggctgagcatcggctttctggtgttgatcctggactcagtggctattgctgcatcctatgtgatgattttcagggccgtgatggggttagccactcctgaggctaggcttaaaaccctggggacatgcgcttctcacctctgtgccatcctgatcttttatgttcccattgctgtttcttccctgattcaccgatttggtcagtgtgtgcctcctccagtccacactctgctggccaacttctatctcctcattcctccaatcctcaatcccattgtctatgctgttaggaacaaacagattcgagatgccttaaagaggttgctaaagagaaagtgctgcaggagaaggtgagcggccgc

SEQ ID NO: 803 - DNA, 1127 bp, synthetic construct
  source 1..1127: mol_type = other DNA; note = OR52N1(R167C,F247I)
ggatccgccaccatgagccaccagatcctgctgctcctggccctgctgaccctaggcctggctgattacaaggacgacgacgataagatcgaattgatgaacgggaccgagggcccaaacttctacgtgcctttctccaacaagacgggcgtggtggaattcatgtcatttctaaatggcaccagcctaactccagcttcattcatcctaaatggcatccctggtttggaagatgtgcatttgtggatctccttcccactgtgtaccatgtacagcattgctattacagggaacttcggccttatgtacctcatctactgtgatgaggccttacacagacctatgtatgtcttccttgcccttctttccttcacagatgtgctcatgtgcaccagcacccttcccaacactctcttcatattgtggtttaatctcaaggagattgattttaaagcctgcctcgcccagatgttctttgtgcacaccttcacagggatggagtctggggtgctcatgctcatggccctggaccactgtgtggccatctgcttccctctgcgttatgccaccatcctcactaattcagtcattgctaaagctgggttcctcacttttcttaggggtgtgatgcttgttatcccttccactttcctcaccaagtgccttccatactgcaagggcaacgtcataccccacacctactgtgaccacatgtctgtggccaagatatcttgtggtaatgtcagggttaacgccatctatggtttgatagttgccctgctgattgggggctttgatatcctgtgcattacaatctcctacactatgattcttcaagcagttgtgagtctatcatcagcagatgctcgacagaaggccttcagcacctgcactgcccacatctgtgccatagtcctcacctatgttccagccttctttaccttctttacacaccattttgggggacacaccattcctctacacatacatattattatggctaatctctacctactaatgcctcccacaatgaaccctattgtgtatggggtgaggaacaaacagattcgagatgccttaaagaggttgctaaagagaaagtgctgcaggagaaggtgagcggccgc

SEQ ID NO: 804 - DNA, 1127 bp, synthetic construct
  source 1..1127: mol_type = other DNA; note = OR52N1(A101T,C125Y,F247I)
ggatccgccaccatgagccaccagatcctgctgctcctggccctgctgaccctaggcctggctgattacaaggacgacgacgataagatcgaattgatgaacgggaccgagggcccaaacttctacgtgcctttctccaacaagacgggcgtggtggaattcatgtcatttctaaatggcaccagcctaactccagcttcattcatcctaaatggcatccctggtttggaagatgtgcatttgtggatctccttcccactgtgtaccatgtacagcattgctattacagggaacttcggccttatgtacctcatctactgtgatgaggccttacacagacctatgtatgtcttccttgcccttctttccttcacagatgtgctcatgtgcaccagcacccttcccaacactctcttcatattgtggtttaatctcaaggagattgattttaaagcctgcctcacccagatgttctttgtgcacaccttcacagggatggagtctggggtgctcatgctcatggccctggaccactatgtggccatctgcttccctctgcgttatgccaccatcctcactaattcagtcattgctaaagctgggttcctcacttttcttaggggtgtgatgcttgttatcccttccactttcctcaccaagcgccttccatactgcaagggcaacgtcataccccacacctactgtgaccacatgtctgtggccaagatatcttgtggtaatgtcagggttaacgccatctatggtttgatagttgccctgctgattgggggctttgatatcctgtgcattacaatctcctacactatgattcttcaagcagttgtgagtctatcatcagcagatgctcgacagaaggccttcagcacctgcactgcccacatctgtgccatagtcctcacctatgttccagccttctttaccttctttacacaccattttgggggacacaccattcctctacacatacatattattatggctaatctctacctactaatgcctcccacaatgaaccctattgtgtatggggtgaggaacaaacagattcgagatgccttaaagaggttgctaaagagaaagtgctgcaggagaaggtgagcggccgc

SEQ ID NO: 805 - DNA, 1127 bp, synthetic construct
  source 1..1127: mol_type = other DNA; note = OR52N2
ggatccgccaccatgagccaccagatcctgctgctcctggccctgctgaccctaggcctggctgattacaaggacgacgacgataagatcgaattgatgaacgggaccgagggcccaaacttctacgtgcctttctccaacaagacgggcgtggtggaattcatgtctggggacaacagctccagcctgaccccaggattctttatcttgaatggcgttcctgggctggaagccacacacatctggatctccctgccattctgctttatgtacatcattgctgtcgtggggaactgtgggctcatctgcctcatcagccatgaggaggccctgcaccggcccatgtactacttcctggccctgctctccttcactgatgtcaccttgtgcaccaccatggtacctaatatgctgtgcatattctggttcaacctcaaggagattgactttaacgcctgcctggcccagatgttttttgtccatatgctgacagggatggagtctggggtgctcatgctcatggccctggaccgctatgtggccatctgctaccccttacgctatgccaccatccttaccaaccctgtcatcgccaaggctggtcttgccaccttcttgaggaatgtgatgctcatcatcccattcactctcctcaccaagcgcctgccctattgccgggggaacttcatcccccacacctactgtgaccatatgtctgtggccaaggtatcctgtggcaatttcaaggtcaatgctatttatggtctgatggttgctctcctgattggtgtgtttgatatctgctgtatctctgtatcttacactatgattttgcaggctgttatgagcctgtcatcagcagatgctcgtcacaaagccttcagcacctgcacatctcacatgtgttccattgtgatcacctatgttgctgcttttttcacttttttcactcatcgttttgtaggacacaatatcccaaaccacatacacatcatcgtggccaacctttatctgctactgcctcctaccatgaacccaattgtttatggagtcaggaacaaacagattcgagatgccttaaagaggttgctaaagagaaagtgctgcaggagaaggtgagcggccgc

SEQ ID NO: 806 - DNA, 1127 bp, synthetic construct
  source 1..1127: mol_type = other DNA; note = OR52N2(S249A,H264R)
ggatccgccaccatgagccaccagatcctgctgctcctggccctgctgaccctaggcctggctgattacaaggacgacgacgataagatcgaattgatgaacgggaccgagggcccaaacttctacgtgcctttctccaacaagacgggcgtggtggaattcatgtctggggacaacagctccagcctgaccccaggattctttatcttgaatggcgttcctgggctggaagccacacacatctggatctccctgccattctgctttatgtacatcattgctgtcgtggggaactgtgggctcatctgcctcatcagccatgaggaggccctgcaccggcccatgtactacttcctggccctgctctccttcactgatgtcaccttgtgcaccaccatggtacctaatatgctgtgcatattctggttcaacctcaaggagattgactttaacgcctgcctggcccagatgttttttgtccatatgctgacagggatggagtctggggtgctcatgctcatggccctggaccgctatgtggccatctgctaccccttacgctatgccaccatccttaccaaccctgtcatcgccaaggctggtcttgccaccttcttgaggaatgtgatgctcatcatcccattcactctcctcaccaagcgcctgccctattgccgggggaacttcatcccccacacctactgtgaccatatgtctgtggccaaggtatcctgtggcaatttcaaggtcaatgctatttatggtctgatggttgctctcctgattggtgtgtttgatatctgctgtatctctgtatcttacactatgattttgcaggctgttatgagcctgtcatcagcagatgctcgtcacaaagccttcagcacctgcacatctcacatgtgtgccattgtgatcacctatgttgctgcttttttcacttttttcactcgtcgttttgtaggacacaatatcccaaaccacatacacatcatcgtggccaacctttatctgctactgcctcctaccatgaacccaattgtttatggagtcaggaacaaacagattcgagatgccttaaagaggttgctaaagagaaagtgctgcaggagaaggtgagcggccgc

SEQ ID NO: 807 - DNA, 1127 bp, synthetic construct
  source 1..1127: mol_type = other DNA; note = OR52N4 (L167R,N218I)
ggatccgccaccatgagccaccagatcctgctgctcctggccctgctgaccctaggcctggctgattacaaggacgacgacgataagatcgaattgatgaacgggaccgagggcccaaacttctacgtgcctttctccaacaagacgggcgtggtggaattcatgctaacactgaataaaacagacctaataccagcttcatttattctgaatggagtcccaggactggaagacacacaactctggatttccttcccattctgctctatgtatgttgtggctatggtagggaattgtggactcctctacctcattcactatgaggatgccctgcacaaacccatgtactacttcttggccatgctttcctttactgaccttgttatgtgctctagtacaatccctaaagccctctgcatcttctggtttcatctcaaggacattggatttgatgaatgccttgtccagatgttcttcacccacaccttcacagggatggagtctggggtgcttatgcttatggccctggatcgctatgtggccatctgctaccccttacgctattcaactatcctcaccaatcctgtaattgcaaaggttgggactgccaccttcctgagaggggtattactcattattccctttactttcctcaccaagcgcctgccctactgcagaggcaatatacttccccatacctactgtgaccacatgtctgtagccaaattgtcctgtggtaatgtcaaggtcaatgccatctatggtctgatggttgccctcctgatttggggctttgacatactgtgtatcaccatctcctataccatgattctccgggcagtggtcagcctctcctcagcagatgctcggcagaaggcctttaatacctgcactgcccacatttgtgccattgttttctcctatactccagctttcttctccttcttttcccaccgctttggggaacacataatccccccttcttgccacatcattgtagccaatatttatctgctcctaccacccactatgaaccctattgtctatggggtgaggaacaaacagattcgagatgccttaaagaggttgctaaagagaaagtgctgcaggagaaggtgagcggccgc

SEQ ID NO: 808 - DNA, 1148 bp, synthetic construct
  source 1..1148: mol_type = other DNA; note = OR52N5
ggatccgccaccatgagccaccagatcctgctgctcctggccctgctgaccctaggcctggctgattacaaggacgacgacgataagatcgaattgatgaacgggaccgagggcccaaacttctacgtgcctttctccaacaagacgggcgtggtggaattcatgcctctatttaattcattatgctggtttccaacaattcatgtgactcctccatcttttattcttaatggaatacctggtctggaaagagtacatgtatggatctccctcccactctgcacaatgtacatcatcttccttgtggggaatcttggtcttgtgtacctcatttattatgaggagtccttacatcatccgatgtattttttttttggccatgctctctccctcattgacctccttacctgcaccaccactctacccaatgcactctgcatcttctggttcagtctcaaagaaattaacttcaatgcttgcttggcccagatgttctttgttcatgggttcacaggtgtggagtctggggtgctcatgctcatggctctagaccgctatgtagccatttgctaccctttgcgttatgctaccacactcaccaaccctatcattgccaaggctgagcttgccaccttcctgaggggtgtattgctgatgattcctttcccattcttggttaagcgtttgcctttctgccaaagcaatattatctcccatacgtactgcgaccacatgtctgtagtaaagctatcttgtgccagcatcaaggtcaatgtaatctatggtctaatggttgctctcctgattggagtgtttgacatttgttgtatatctttgtcttacactttgatcctcaaggcagcgatcagcctctcttcatcagatgctcggcagaaggctttcagcacctgcactgcccatatatctgccatcatcatcacctatgttccagcattcttcactttctttgcccaccgttttgggggacacacaattcccccttctcttcacatcattgtggctaatctttatcttcttcttcccccaactctaaaccctattgtttatggagtaaggaacaaacagattcgagatgccttaaagaggttgctaaagagaaagtgctgcaggagaaggtgagcggccgc

SEQ ID NO: 809 - DNA, 1127 bp, synthetic construct
  source 1..1127: mol_type = other DNA; note = OR52R1
ggatccgccaccatgagccaccagatcctgctgctcctggccctgctgaccctaggcctggctgattacaaggacgacgacgataagatcgaattgatgaacgggaccgagggcccaaacttctacgtgcctttctccaacaagacgggcgtggtggaattcatggtgctggcttcagggaacagctcttctcatcctgtgtccttcatcctgcttggaatcccaggcctggagagtttccagttgtggattgcctttccgttctgtgccacgtatgctgtggctgttgttggaaatatcactctcctccatgtaatcagaattgaccacaccctgcatgagcccatgtacctctttctggccatgctggccatcactgacctggtcctctcctcctccactcaacctaagatgttggccatattctggtttcatgctcatgagattcagtaccatgcctgcctcatccaggtgttcttcatccatgccttttcttctgtggagtctggggtgctcatggctatggccctggactgctacgtggctatctgcttcccactccgacactctagcatcctgaccccatcggtcgtgatcaaactggggaccatcgtgatgctgagagggctgctgtgggtgagccccttctgcttcatggtgtctaggatgcccttctgccaacaccaagccattccccagtcatactgtgagcacatggctgtgctgaagttggtgtgtgctgatacaagcataagtcgtgggaatgggctctttgtggccttctctgtggctggctttgatatgattgtcattggtatgtcatacgtgatgattttgagagctgtgcttcagttgccctcaggtgaagcccgcctcaaagcttttagcacacgttcctcccatatctgtgtcatcttggctctttatatcccagcccttttttctttcctcacctaccgctttggccatgatgtgccccgagttgtacacatcctgtttgctaatctctatctactgatacctcccatgctcaaccccatcatttatggagttaggaacaaacagattcgagatgccttaaagaggttgctaaagagaaagtgctgcaggagaaggtgagcggccgc

SEQ ID NO: 810 - DNA, 1127 bp, synthetic construct
  source 1..1127: mol_type = other DNA; note = OR52R1(I129T,N201Y,S245A)
ggatccgccaccatgagccaccagatcctgctgctcctggccctgctgaccctaggcctggctgattacaaggacgacgacgataagatcgaattgatgaacgggaccgagggcccaaacttctacgtgcctttctccaacaagacgggcgtggtggaattcatggtgctggcttcagggaacagctcttctcatcctgtgtccttcatcctgcttggaatcccaggcctggagagtttccagttgtggattgcctttccgttctgtgccacgtatgctgtggctgttgttggaaatatcactctcctccatgtaatcagaattgaccacaccctgcatgagcccatgtacctctttctggccatgctggccatcactgacctggtcctctcctcctccactcaacctaagatgttggccatattctggtttcatgctcatgagattcagtaccatgcctgcctcatccaggtgttcttcatccatgccttttcttctgtggagtctggggtgctcatggctatggccctggactgctacgtggctacctgcttcccactccgacactctagcatcctgaccccatcggtcgtgatcaaactggggaccatcgtgatgctgagagggctgctgtgggtgagccccttctgcttcatggtgtctaggatgcccttctgccaacaccaagccattccccagtcatactgtgagcacatggctgtgctgaagttggtgtgtgctgatacaagcataagtcgtgggtatgggctctttgtggccttctctgtggctggctttgatatgattgtcattggtatgtcatacgtgatgattttgagagctgtgcttcagttgccctcaggtgaagcccgcctcaaagcttttagcacacgtgcctcccatatctgtgtcatcttggctctttatatcccagcccttttttctttcctcacctaccgctttggccatgatgtgccccgagttgtacacatcctgtttgctaatctctatctactgatacctcccatgctcaaccccatcatttatggagttaggaacaaacagattcgagatgccttaaagaggttgctaaagagaaagtgctgcaggagaaggtgagcggccgc

SEQ ID NO: 811 - DNA, 1136 bp, synthetic construct
  source 1..1136: mol_type = other DNA; note = OR52W1(H239R,L254Q)
ggatccgccaccatgagccaccagatcctgctgctcctggccctgctgaccctaggcctggctgattacaaggacgacgacgataagatcgaattgatgaacgggaccgagggcccaaacttctacgtgcctttctccaacaagacgggcgtggtggaattcatggcagaaactctacaactcaattccaccttcctacacccaaacttcttcatactgactggctttccagggctaggaagtgcccagacttggctgacactggtctttgggcccatttatctgctggccctgctgggcaatggagcactgccggcagtggtgtggatagactccacactgcaccagcccatgtttctactgttggccatcctggcagccacagacctgggcttagccacatctatagccccagggttgctggctgtgctgtggcttgggccccgatctgtgccatatgctgtgtgcctggtccagatgttctttgtacatgcactgactgccatggaatcaggtgtgcttttggccatggcctgtgatcgtgctgcggcaatagggcgtccactgcactaccctgtcctggtcaccaaagcctgtgtgggttatgcagccttggccctggcactgaaagctgtggctattgttgtacctttcccactgctggtggcaaagtttgagcacttccaagccaagaccataggccatacctattgtgcacacatggcagtggtagaactggtggtgggtaacacacaggccaccaacttatatggtctggcactttcactggccatctcaggtatggatattctgggtatcactggctcctatggactcattgcccatgctgtgctgcagctacctacccgggaggcccgtgccaaggcctttggtacatgtagttctcacatctgtgtcattcaggccttctacatacctggtctcttctcctacctcacacaccgctttggtcatcacactgtcccaaagcctgtgcacatccttctctccaacatctacttgctgctgccacctgccctcaaccccctcatctatggggccaggaacaaacagattcgagatgccttaaagaggttgctaaagagaaagtgctgcaggagaaggtgagcggccgc

SEQ ID NO: 812 - DNA, 1127 bp, synthetic construct
  source 1..1127: mol_type = other DNA; note = OR56A1
ggatccgccaccatgagccaccagatcctgctgctcctggccctgctgaccctaggcctggctgattacaaggacgacgacgataagatcgaattgatgaacgggaccgagggcccaaacttctacgtgcctttctccaacaagacgggcgtggtggaattcatggcgtcacccagcaacagctccactgtcccagtctctgaattcctcctcatctgcttccccaacttccagagttggcagcactggctctccctgcccctcagccttctcttcctcctggccatgggagctaacaccaccctcctgatcaccatccagctggaggcctctctgcaccagcccctgtactacctgctcagcctcctctccctgctggacatcgtgctctgcctcaccgtcatccccaaggtcctggccatcttctggtatgatcttaggtcgatcagcttccctgcctgcttcctccagatgttcatcatgaacagtttcctccccatggagtcctgcacgtttatggtcatggcctatgaccgttatgtggccatctgccacccactgcggtacccatccatcatcactaatcaatttgtggccaaagctagtgtcttcattgtggtgcggaatgcgcttcttactgcacccattcctatcctcacttccctgctccattactgtggggaaaatgtcattgagaactgcatctgtgccaacttgtctgtgtccaggctctcctgtgataatttcacccttaacagaatctaccaatttgtggctggttggaccttgctgggctcagatttattcctcatcttcctctcttacaccttcattctaagagctgtgcttagattcaaagcagagggggcggcagtgaaggccctgagcacatgtggctcccacttcatcctcattcttttcttcagcaccatactgctggttgtggtgttgacaaacgtggccagaaagaaggtccccatggacatcctgatcctgctgaacgtccttcatcaccttattcctcctgcattgaaccctattgtgtatggggttaggaacaaacagattcgagatgccttaaagaggttgctaaagagaaagtgctgcaggagaaggtgagcggccgc

SEQ ID NO: 813 - DNA, 1130 bp, synthetic construct
  source 1..1130: mol_type = other DNA; note = OR56A3
ggatccgccaccatgagccaccagatcctgctgctcctggccctgctgaccctaggcctggctgattacaaggacgacgacgataagatcgaattgatgaacgggaccgagggcccaaacttctacgtgcctttctccaacaagacgggcgtggtggaattcatgacaacacaccgaaatgacaccctctccactgaagcttcagacttcctcttgaattgttttgtcagatcccccagctggcagcactggctgtccctgcccctcagcctccttttcctcttggccgtaggggccaacaccaccctcctgatgaccatctggctggaggcctctctgcaccagcccctgtactacctgctcagcctcctctccctgctggacatcgtgctctgcctcactgtcatccccaaggtcctgaccatcttctggtttgacctcaggcccatcagcttccctgcctgcttcctccagatgtacatcatgaattgtttcctagccatggagtcttgcacattcatggtcatggcctatgatcgttatgtagccatctgccacccactgagatatccatcaatcatcactgatcactttgtagtcaaggctgccatgtttattttgaccagaaatgtgcttatgactctgcccatccccatcctttcagcacaactccgttattgtggaagaaatgtcattgagaactgcatctgtgccaatatgtctgtttccagactctcctgcgatgatgtcaccatcaatcacctttaccaatttgctggaggctggactctgctaggatctgacctcatccttatcttcctctcctacaccttcattctgcgagctgtgctgagactcaaggcagagggtgccgtggcaaaggccctaagcacatgtggctcccacttcatgctcatcctcttcttcagcaccatccttctggtttttgtcctcacacatgtggctaagaagaaagtctcccctgatgtgccagtcttgctcaatgttctccaccatgtcattcctgcagcccttaaccccatcatttacggggtgaggaacaaacagattcgagatgccttaaagaggttgctaaagagaaagtgctgcaggagaaggtgagcggccgc

SEQ ID NO: 814 - DNA, 1130 bp, synthetic construct
  source 1..1130: mol_type = other DNA; note = OR56A3(M51T)
ggatccgccaccatgagccaccagatcctgctgctcctggccctgctgaccctaggcctggctgattacaaggacgacgacgataagatcgaattgatgaacgggaccgagggcccaaacttctacgtgcctttctccaacaagacgggcgtggtggaattcatgacaacacaccgaaatgacaccctctccactgaagcttcagacttcctcttgaattgttttgtcagatcccccagctggcagcactggctgtccctgcccctcagcctccttttcctcttggccgtaggggccaacaccaccctcctgacgaccatctggctggaggcctctctgcaccagcccctgtactacctgctcagcctcctctccctgctggacatcgtgctctgcctcactgtcatccccaaggtcctgaccatcttctggtttgacctcaggcccatcagcttccctgcctgcttcctccagatgtacatcatgaattgtttcctagccatggagtcttgcacattcatggtcatggcctatgatcgttatgtagccatctgccacccactgagatatccatcaatcatcactgatcactttgtagtcaaggctgccatgtttattttgaccagaaatgtgcttatgactctgcccatccccatcctttcagcacaactccgttattgtggaagaaatgtcattgagaactgcatctgtgccaatatgtctgtttccagactctcctgcgatgatgtcaccatcaatcacctttaccaatttgctggaggctggactctgctaggatctgacctcatccttatcttcctctcctacaccttcattctgcgagctgtgctgagactcaaggcagagggtgccgtggcaaaggccctaagcacatgtggctcccacttcatgctcatcctcttcttcagcaccatccttctggtttttgtcctcacacatgtggctaagaagaaagtctcccctgatgtgccagtcttgctcaatgttctccaccatgtcattcctgcagcccttaaccccatcatttacggggtgaggaacaaacagattcgagatgccttaaagaggttgctaaagagaaagtgctgcaggagaaggtgagcggccgc

SEQ ID NO: 815 - DNA, 1127 bp, synthetic construct
  source 1..1127: mol_type = other DNA; note = OR56A4
ggatccgccaccatgagccaccagatcctgctgctcctggccctgctgaccctaggcctggctgattacaaggacgacgacgataagatcgaattgatgaacgggaccgagggcccaaacttctacgtgcctttctccaacaagacgggcgtggtggaattcatggcatctcccagcaatgactccactgccccagtctctgaattcctcctcatctgcttccccaacttccagagctggcagcactggttgtctctgcccctcagccttctcttcctcctggccatgggagctaacaccaccctcctgatcaccatccagctggaggcctctctgcaccagcccctgtactacctgctcagcctcctctccctgctggacatcgtgctctgcctcaccgtcatccccaaggtcctggccatcttctggtttgacctcaggtcgatcagcttcccagcctgcttcctccagatgttcatcatgaacagttttttgaccatggagtcctgcacgttcatggtcatggcctatgaccgttatgtggccatctgccatccattgagatacccgtctatcatcactgaccagtttgtggctagggccgtggtctttgttatagcccggaatgcctttgtttctcttcctgttcccatgctttctgccaggctcagatactgtgcaggaaacataatcaagaactgcatctgcagtaacctgtctgtgtccaaactctcttgtgatgacatcactttcaatcagctctaccagtttgtggcaggctggactctgttgggctctgatcttatccttattgttatctcctattcttttatattgaaagttgtgcttaggatcaaggccgagggtgctgtggccaaggccttgagcacgtgtggttcccacttcatcctcatcctcttcttcagcacagtcctgctggttctggtcatcactaacctggccaggaagagaattcctccagatgtccccatcctgctcaacatcctgcaccacctcattcccccagctctgaaccccattgtttatggtgtgaggaacaaacagattcgagatgccttaaagaggttgctaaagagaaagtgctgcaggagaaggtgagcggccgc

SEQ ID NO: 816 - DNA, 1127 bp, synthetic construct
  source 1..1127: mol_type = other DNA; note = OR56A5
ggatccgccaccatgagccaccagatcctgctgctcctggccctgctgaccctaggcctggctgattacaaggacgacgacgataagatcgaattgatgaacgggaccgagggcccaaacttctacgtgcctttctccaacaagacgggcgtggtggaattcatgacattacccagcaacaactccacttccccagtctttgaattcttcctcatttgtttccccagtttccagagctggcagcactggctgtctctgcccctcagcctcctcttcctcctggccatgggggccaatgccacccttctgatcaccatctatctggaagcctctctgcaccagcccctgtactacctgctcagcctcctctccctgctggacatcgtactctgcctcaccgtcatccccaaggtcctggccatcttctggtttgacctcagatcaatcagcttccctgcctgcttccttcaggtgttcatcatgaacagttttctgactatggagtcctgcacattcatgatcatggcctatgaccgctatgtggccatctgcaagcccctacagtactcatccatcatcactgatcaatttgtcgctagggctgccatctttgttgtggccaggaatggccttcttactatgcctatccccatactttcttctcgactcagatactgtgcaggacacatcatcaagaactgcatctgtactaacgtgtctgtgtctaaactctcttgtgatgacatcaccttgaatcagagctaccagtttgttataggttggaccctgctgggctctgacctcatccttattgttctctcttacttttttatcttgaaaactgtgctaaggattaagggtgagggagatatggccaaagctctaggtacttgtggttcccacttcatcctcatcctcttcttcaccacagtcctgctggttctggtcatcactaacctggccaggaagagaattcctccggatgtccccatcctgctcaacatcctgcaccaccttattcccccagctctgaaccccattgtttatggtgtgaggaacaaacagattcgagatgccttaaagaggttgctaaagagaaagtgctgcaggagaaggtgagcggccgc

SEQ ID NO: 817 - DNA, 1133 bp, synthetic construct
  source 1..1133: mol_type = other DNA; note = OR56B1(C103R)
ggatccgccaccatgagccaccagatcctgctgctcctggccctgctgaccctaggcctggctgattacaaggacgacgacgataagatcgaattgatgaacgggaccgagggcccaaacttctacgtgcctttctccaacaagacgggcgtggtggaattcatgtctgcatctctcaaaatctccaatagctccaaattccaggtctctgagttcatcctgctgggattcccgggcattcacagctggcaacactggctatctctgcccctggcactactgtatctctcagcacttgctgcaaacaccctcatcctcatcatcatctggcagaacccttctttacagcagcccatgtatattttccttggcatcctctgtatggtagacatgggtctggccactactatcatccctaagatcctggccatcttctggtttgatgccaaggttattagcctccctgagcgctttgctcagatttatgccattcacttctttgtgggcatggagtctggtatcctactctgcatggcttttgatagatatgtggctatttgtcaccctcttcgctatccatcaattgtcaccagttccttaatcttaaaagctaccctgttcatggtgctgagaaatggcttatttgtcactccagtgcctgtgcttgcagcacagcgtgattattgctccaagaatgaaattgaacactgcctgtgctctaaccttggggtcacaagcctggcttgtgatgacaggaggccaaacagcatttgccagttggttctggcatggcttggaatggggagtgatctaagtcttattatactgtcatatattttgattctgtactctgtacttagactgaactcagctgaagctgcagccaaggccctgagcacttgtagttcacatctcaccctcatccttttcttttacactattgttgtagtgatttcagtgactcatctgacagagatgaaggctactttgattccagttctacttaatgtgttgcacaacatcatccccccttccctcaaccctacagtttatgcacttaggaacaaacagattcgagatgccttaaagaggttgctaaagagaaagtgctgcaggagaaggtgagcggccgc

SEQ ID NO: 818 - DNA, 1130 bp, synthetic construct
  source 1..1130: mol_type = other DNA; note = OR56B4
ggatccgccaccatgagccaccagatcctgctgctcctggccctgctgaccctaggcctggctgattacaaggacgacgacgataagatcgaattgatgaacgggaccgagggcccaaacttctacgtgcctttctccaacaagacgggcgtggtggaattcatggatacctccaccagtgttacctatgactccagcctccagatttcccagttcatcctgatgggattaccaggcattcatgagtggcagcactggctctccctgcccctgactctgctctacctcttagctcttggtgccaatctcctcatcataatcaccattcaacatgagaccgtgctacatgaacccatgtaccatttgctgggcatattagcagtggtggacattggcctggccaccaccatcatgcccaagatcctggccatcttctggtttgatgccaaggccattagcctccccatgtgttttgctcagatctatgccatccactgcttcttctgcatagagtcaggcatctttctctgcatggcagtagacagatacatagccatctgtcgccctcttcagtacccctccatagtcactaaagcttttgtcttcaaagccacagggttcatcatgctcaggaatggcctgttgaccatcccagtgcctatactggctgcccagagacactactgttccaggaatgaaatcgagcactgcctctgctctaacttgggggttatcagcctggcttgtgatgacatcactgtgaacaaattttaccaactgatgctagcatgggtcttggttgggagtgatatggctctggtattttcttcctatgctgtaatccttcactctgtgctgaggctgaactcagcagaagcaatgtccaaggctctgagcacttgtagctcccacctcatcctcatcctcttccacacaggtatcattgtgctgtctgtcacacaccttgcagagaaaaagattccccttattcctgtgttccttaatgtgctgcacaatgtcatcccccctgcactcaaccccctggcctgtgcactcaggaacaaacagattcgagatgccttaaagaggttgctaaagagaaagtgctgcaggagaaggtgagcggccgc

SEQ ID NO: 819 - DNA, 1130 bp, synthetic construct
  source 1..1130: mol_type = other DNA; note = OR56B4(P277S)
ggatccgccaccatgagccaccagatcctgctgctcctggccctgctgaccctaggcctggctgattacaaggacgacgacgataagatcgaattgatgaacgggaccgagggcccaaacttctacgtgcctttctccaacaagacgggcgtggtggaattcatggatacctccaccagtgttacctatgactccagcctccagatttcccagttcatcctgatgggattaccaggcattcatgagtggcagcactggctctccctgcccctgactctgctctacctcttagctcttggtgccaatctcctcatcataatcaccattcaacatgagaccgtgctacatgaacccatgtaccatttgctgggcatattagcagtggtggacattggcctggccaccaccatcatgcccaagatcctggccatcttctggtttgatgccaaggccattagcctccccatgtgttttgctcagatctatgccatccactgcttcttctgcatagagtcaggcatctttctctgcatggcagtagacagatacatagccatctgtcgccctcttcagtacccctccatagtcactaaagcttttgtcttcaaagccacagggttcatcatgctcaggaatggcctgttgaccatcccagtgcctatactggctgcccagagacactactgttccaggaatgaaatcgagcactgcctctgctctaacttgggggttatcagcctggcttgtgatgacatcactgtgaacaaattttaccaactgatgctagcatgggtcttggttgggagtgatatggctctggtattttcttcctatgctgtaatccttcactctgtgctgaggctgaactcagcagaagcaatgtccaaggctctgagcacttgtagctcccacctcatcctcatcctcttccacacaggtatcattgtgctgtctgtcacacaccttgcagagaaaaagattccccttatttctgtgttccttaatgtgctgcacaatgtcatcccccctgcactcaaccccctggcctgtgcactcaggaacaaacagattcgagatgccttaaagaggttgctaaagagaaagtgctgcaggagaaggtgagcggccgc

SEQ ID NO: 820 - protein, 16 aa, synthetic construct
  source 1..16: note = C-terminal domain motif
  VARIANT 3: note = K or R
  VARIANT 4: note = E or D or Q
  VARIANT 5: note = V or M or I or L
  VARIANT 6: note = K or R
  VARIANT 9: note = L or I or V
  VARIANT 10: note = K or R or H
  VARIANT 11: note = K or R
  VARIANT 13: note = L or I or F
  VARIANT 14: note = K or R or G
  VARIANT 15: note = K or R
  VARIANT 16: note = K or R
RNXXXXKAXXXJXXXX

SEQ ID NO: 821 - protein, 16 aa, synthetic construct
  source 1..16: note = C-terminal domain motif
  VARIANT 3: note = K or R
  VARIANT 5: note = V or M or I
  VARIANT 6: note = K or R
  VARIANT 9: note = L or I or V
  VARIANT 10: note = K or R
  VARIANT 11: note = K or R
  VARIANT 13: note = L or I or F
  VARIANT 14: note = K or R
  VARIANT 15: note = K or R
  VARIANT 16: note = K or R
RNXEXXKAXXXLXXXX

SEQ ID NO: 822 - protein, 18 aa, synthetic construct
  source 1..18: note = C-terminal domain motif
  VARIANT 3: note = K or R
  VARIANT 4: note = E or D or Q
  VARIANT 5: note = V or M or I or L
  VARIANT 6: note = K or R
  VARIANT 9: note = L or I or V
  VARIANT 10: note = K or R or H
  VARIANT 11: note = K or R
  VARIANT 13: note = L or I or F
  VARIANT 14: note = K or R or G
  VARIANT 15: note = K or R
  VARIANT 16: note = K or R
RNXXXXKAXXXJXXXXCC

SEQ ID NO: 823 - protein, 18 aa, synthetic construct
  source 1..18: note = C-terminal domain motif
  VARIANT 3: note = K or R
  VARIANT 5: note = V or M or I
  VARIANT 6: note = K or R
  VARIANT 9: note = L or I or V
  VARIANT 10: note = K or R
  VARIANT 11: note = K or R
  VARIANT 13: note = L or I or F
  VARIANT 14: note = K or R
  VARIANT 15: note = K or R
  VARIANT 16: note = K or R
RNXEXXKAXXXLXXXXCC

SEQ ID NO: 824 - protein, 16 aa, synthetic construct
  source 1..16: note = C-terminal domain motif
  VARIANT 3: note = K or R
  VARIANT 7: note = can be any amino acid
  VARIANT 9: note = L or I or V
  VARIANT 10: note = K or R or H
  VARIANT 11: note = K or R
  VARIANT 13: note = L or I or F
  VARIANT 14: note = K or R or G
  VARIANT 15: note = K or R
  VARIANT 16: note = K or R
RNXQIRXAXXXJXXXX

SEQ ID NO: 825 - protein, 21 aa, synthetic construct
  source 1..21: note = C-terminal domain motif
  VARIANT 3: note = K or R
  VARIANT 4: note = E or D or Q
  VARIANT 5: note = V or M or I or L
  VARIANT 6: note = K or R
  VARIANT 7: note = can be any amino acid
  VARIANT 9: note = L or I or V
  VARIANT 10: note = K or R or H
  VARIANT 11: note = K or R
  VARIANT 13: note = L or I or F
  VARIANT 14: note = K or R or G
  VARIANT 15: note = K or R
  VARIANT 16: note = K or R
RNXXXXXAXXXJXXXXCCRRR

SEQ ID NO: 826 - protein, 21 aa, synthetic construct
  source 1..21: note = C-terminal domain motif
  VARIANT 3: note = K or R
  VARIANT 7: note = can be any amino acid
  VARIANT 9: note = L or I or V
  VARIANT 10: note = K or R or H
  VARIANT 11: note = K or R
  VARIANT 13: note = L or I or F
  VARIANT 14: note = K or R or G
  VARIANT 15: note = K or R
  VARIANT 16: note = K or R
RNXQIRXAXXXJXXXXCCRRR

SEQ ID NO: 827 - protein, 16 aa, synthetic construct
  source 1..16: note = C-terminal domain sequence
RNREMRKALHRLLGKK

SEQ ID NO: 828 - protein, 16 aa, synthetic construct
  source 1..16: note = C-terminal domain sequence
RNREVKKAIHKLIGRK

SEQ ID NO: 829 - protein, 16 aa, synthetic construct
  source 1..16: note = C-terminal domain sequence
RNREVRKAVHRLFKRK

SEQ ID NO: 830 - protein, 16 aa, synthetic construct
  source 1..16: note = C-terminal domain sequence
RNKEMKKAIHKLFGKK

SEQ ID NO: 831 - protein, 16 aa, synthetic construct
  source 1..16: note = C-terminal domain sequence
RNRDVKKAVHKLFRRK

SEQ ID NO: 832 - protein, 16 aa, synthetic construct
  source 1..16: note = C-terminal domain sequence
RNRDMKKAVHKLFGKR

SEQ ID NO: 833 - protein, 16 aa, synthetic construct
  source 1..16: note = C-terminal domain sequence
RNKELRKALHKLLGRK

SEQ ID NO: 834 - protein, 16 aa, synthetic construct
  source 1..16: note = C-terminal domain sequence
RNRDVRKALRRILRRR

SEQ ID NO: 835 - protein, 16 aa, synthetic construct
  source 1..16: note = C-terminal domain sequence
RNKDVRKAVRKLIRRR

SEQ ID NO: 836 - protein, 16 aa, synthetic construct
  source 1..16: note = C-terminal domain sequence
RNRDVRKAVRRLFRKR

SEQ ID NO: 837 - protein, 16 aa, synthetic construct
  source 1..16: note = C-terminal domain sequence
RNKDIKKAVKKLIKKK

SEQ ID NO: 838 - protein, 16 aa, synthetic construct
  source 1..16: note = C-terminal domain sequence
RNRELRKAVRRLFKRR

SEQ ID NO: 839 - protein, 16 aa, synthetic construct
  source 1..16: note = C-terminal domain sequence
RNKELRKAVRKIIKKK

SEQ ID NO: 840 - protein, 16 aa, synthetic construct
  source 1..16: note = C-terminal domain sequence
RNRDVKKAVRRLFRRK

SEQ ID NO: 841 - protein, 16 aa, synthetic construct
  source 1..16: note = C-terminal domain sequence
RNREVRKALRRIIRKR

SEQ ID NO: 842 - protein, 16 aa, synthetic construct
  source 1..16: note = C-terminal domain sequence
RNKDIRKAVKKIFRRK

SEQ ID NO: 843 - protein, 16 aa, synthetic construct
  source 1..16: note = C-terminal domain sequence
RNKDVRKAVRRLIKRK

SEQ ID NO: 844 - protein, 16 aa, synthetic construct
  source 1..16: note = C-terminal domain sequence
RNRDLRKAVRKLFKKK

SEQ ID NO: 845 - protein, 16 aa, synthetic construct
  source 1..16: note = C-terminal domain sequence
RNRDLRKALRRIFKRR

SEQ ID NO: 846 - protein, 16 aa, synthetic construct
  source 1..16: note = C-terminal domain sequence
RNRDVRKAIKKLIRKR

SEQ ID NO: 847 - protein, 16 aa, synthetic construct
  source 1..16: note = C-terminal domain sequence
RNKELKKAIKRILKKK

SEQ ID NO: 848 - protein, 16 aa, synthetic construct
  source 1..16: note = C-terminal domain sequence
RNRDVRKAIRKLLKRK

SEQ ID NO: 849 - protein, 16 aa, synthetic construct
  source 1..16: note = C-terminal domain sequence
RNRDLRKAVRRIFKKR

SEQ ID NO: 850 - protein, 16 aa, synthetic construct
  source 1..16: note = C-terminal domain sequence
RNRDVRKAVRKLFKRR

SEQ ID NO: 851 - protein, 16 aa, synthetic construct
  source 1..16: note = C-terminal domain sequence
RNRDVRKALRRLFKKR

SEQ ID NO: 852 - protein, 16 aa, synthetic construct
  source 1..16: note = C-terminal domain sequence
RNKELKKALRKLIGKK

SEQ ID NO: 853 - protein, 16 aa, synthetic construct
  source 1..16: note = C-terminal domain sequence
RNREMRKAIKKIIKKK

SEQ ID NO: 854 - protein, 16 aa, synthetic construct
  source 1..16: note = C-terminal domain sequence
RNKEIKKAIKKIIKKR

SEQ ID NO: 855 - protein, 16 aa, synthetic construct
  source 1..16: note = C-terminal domain sequence
RNRDVKKAIRRLFRRR

SEQ ID NO: 856 - protein, 16 aa, synthetic construct
  source 1..16: note = C-terminal domain sequence
RNREVKKAVKKLIGKR

SEQ ID NO: 857 - protein, 16 aa, synthetic construct
  source 1..16: note = C-terminal domain sequence
RNREMRKALRRLFRKR

SEQ ID NO: 858 - protein, 16 aa, synthetic construct
  source 1..16: note = C-terminal domain sequence
RNKELKKALRRLIGRR

SEQ ID NO: 859 - protein, 16 aa, synthetic construct
  source 1..16: note = C-terminal domain sequence
RNRDVKKALRKLIGKR

SEQ ID NO: 860 - protein, 16 aa, synthetic construct
  source 1..16: note = C-terminal domain sequence
RNREVKKAVKKLIRRK

SEQ ID NO: 861 - protein, 16 aa, synthetic construct
  source 1..16: note = C-terminal domain sequence
RNKEVRKALKKLFGKK

SEQ ID NO: 862 - protein, 16 aa, synthetic construct
  source 1..16: note = C-terminal domain sequence
RNKEIRKALRRLFGKK

SEQ ID NO: 863 - protein, 16 aa, synthetic construct
  source 1..16: note = C-terminal domain sequence
RNKDVKKALRRLFGKK

SEQ ID NO: 864 - protein, 16 aa, synthetic construct
  source 1..16: note = C-terminal domain sequence
RNKELKKAIKRLIRRK

SEQ ID NO: 865 - protein, 16 aa, synthetic construct
  source 1..16: note = C-terminal domain sequence
RNKDVRKAVKRLLKKR

SEQ ID NO: 866 - protein, 16 aa, synthetic construct
  source 1..16: note = C-terminal domain sequence
RNKELRKAIRRLLRRR

SEQ ID NO: 867 - protein, 16 aa, synthetic construct
  source 1..16: note = C-terminal domain sequence
RNRDIRKALRKLFKKK

SEQ ID NO: 868 - protein, 16 aa, synthetic construct
  source 1..16: note = C-terminal domain sequence
RNRELKKALRRLLRRR

SEQ ID NO: 869 - protein, 16 aa, synthetic construct
  source 1..16: note = C-terminal domain sequence
RNREVKKALRRLFGKK

SEQ ID NO: 870 - protein, 16 aa, synthetic construct
  source 1..16: note = C-terminal domain sequence
RNRDVRKALKRLLKRK

SEQ ID NO: 871 - protein, 16 aa, synthetic construct
  source 1..16: note = C-terminal domain sequence
RNRDMRKAIRKLFGRK

SEQ ID NO: 872 - protein, 16 aa, synthetic construct
  source 1..16: note = C-terminal domain sequence
RNRELKKAIRKLLKRK

SEQ ID NO: 873 - protein, 16 aa, synthetic construct
  source 1..16: note = C-terminal domain sequence
RNRDIRKAVKKLFGKK

SEQ ID NO: 874 - protein, 16 aa, synthetic construct
  source 1..16: note = C-terminal domain sequence
RNKEVKKAIRKLFGRR

SEQ ID NO: 875 - protein, 16 aa, synthetic construct
  source 1..16: note = C-terminal domain sequence
RNREVRKAVRKLFRRK

SEQ ID NO: 876 - protein, 16 aa, synthetic construct
  source 1..16: note = C-terminal domain sequence
RNRDMKKALKKLFRRR

SEQ ID NO: 877 - protein, 16 aa, synthetic construct
  source 1..16: note = C-terminal domain sequence
RNRDVRKALKRLLGRR

SEQ ID NO: 878 - protein, 16 aa, synthetic construct
  source 1..16: note = C-terminal domain sequence
RNKDLKKAVKKLFGRK

SEQ ID NO: 879 - protein, 16 aa, synthetic construct
  source 1..16: note = C-terminal domain sequence
RNKDVRKAVRRLFGRR

SEQ ID NO: 880 - protein, 16 aa, synthetic construct
  source 1..16: note = C-terminal domain sequence
RNKEVKCALKRLLKRK

SEQ ID NO: 881 - protein, 16 aa, synthetic construct
  source 1..16: note = C-terminal domain sequence
RNKEVKFALKRLLKRK

SEQ ID NO: 882 - protein, 16 aa, synthetic construct
  source 1..16: note = C-terminal domain sequence
RNKEVKHALKRLLKRK

SEQ ID NO: 883 - protein, 16 aa, synthetic construct
  source 1..16: note = C-terminal domain sequence
RNKEVKIALKRLLKRK

SEQ ID NO: 884 - protein, 16 aa, synthetic construct
  source 1..16: note = C-terminal domain sequence
RNKEVKLALKRLLKRK

SEQ ID NO: 885 - protein, 16 aa, synthetic construct
  source 1..16: note = C-terminal domain sequence
RNKEVKMALKRLLKRK

SEQ ID NO: 886 - protein, 16 aa, synthetic construct
  source 1..16: note = C-terminal domain sequence
RNKEVKSALKRLLKRK

SEQ ID NO: 887 - protein, 16 aa, synthetic construct
  source 1..16: note = C-terminal domain sequence
RNKEVKTALKRLLKRK

SEQ ID NO: 888 - protein, 16 aa, synthetic construct
  source 1..16: note = C-terminal domain sequence
RNKEVKWALKRLLKRK

SEQ ID NO: 889 - protein, 16 aa, synthetic construct
  source 1..16: note = C-terminal domain sequence
RNKEVKYALKRLLKRK

SEQ ID NO: 890 - protein, 16 aa, synthetic construct
  source 1..16: note = C-terminal domain sequence
RNKQIRDALKRLLKRK

1. An olfactory receptor protein, wherein said protein has a modified C-terminal domain comprising the amino acid sequence motif
(SEQ ID NO: 1)
RN[KR][EDQ][VMIL][KR]xA[LIV][KRH][KR][LI][LIF][KRG][KR][KR].

2. The olfactory receptor protein according to claim 1, wherein said modified C-terminal domain is fused to the seventh transmembrane helix of the protein.

3. An The olfactory receptor protein according to claim 1, wherein the protein is a class I or class II olfactory receptor with a modified C-terminal domain.

4. The olfactory receptor protein according to claim 3, wherein the class II receptor is selected from the group consisting of OR7C1, OR9Q2, OR8K3, OR10J5, OR1C1, OR7D4, OR2T4, OR5B12, OR7A17, OR10H5, OR5A1, OR5A2, OR1N2, OR2C1, OR2T11, OR2M2, OR4S2, OR2V1, OR5P3, OR6P1, OR2L2, OR10G7, OR5AN1, OR5V1, OR2L3, OR2AG2, OR7A5, OR7E24, OR7A10, OR10H2, OR10H1, OR10D3, OR1D2, OR2A5, OR2A25, OR11G2, OR14J1, OR5M3, OR8D1, OR10G3, OR10G9, OR2L5, OR8H1, OR10K1, OR11A1, OR2AK2, OR10A3, OR10A6, OR10J1, OR2J2, and combinations thereof.

5. The olfactory receptor protein according to claim 4, wherein the class I receptor is selected from the group consisting of OR52A5, OR52E8, OR56A4, OR51B2, OR52K1, OR56A1, OR51B5, OR56A3, OR51L1, and combinations thereof.

6. The olfactory receptor protein according to claim 1, wherein the sequence motif is
(SEQ ID NO: 5)
RN[KR]E[VMI][KR]xA[LIV][KR][KR]L[LIF][KR][KR][KR].

7-9. (canceled)

10. The olfactory receptor protein according to claim 1, wherein the amino acid sequence motif comprises 1 to 6 additional C-terminal amino acid residues, optionally wherein:
the first additional amino acid residue is selected from C, R, K, E, G, H, F, P, Y, W, M and N;
the second additional amino acid residue is selected from C, R, K, N, G, I, L, F, P, T, Y and Q;
the third additional amino acid residue is selected from R, K, C, L, F, M, Y, A, P, S, G, H, and N; and
the fourth, fifth and sixth additional amino acid residues are selected from K and R.

11. The olfactory receptor protein according to claim 1, wherein the sequence motif is selected from the group consisting of SEQ ID NOs: 1, 5-75, 86-130, 133-147, 149-151, 154, 156-158, 166, 167, 198, 219-221, 254-312, 319-326, 328-331, 740-741, 820-890, and combinations thereof.

12. A nucleic acid molecule comprising a nucleotide sequence encoding the olfactory receptor protein of claim 1.

13. The expression vector comprising the nucleic acid molecule of claim 12.

14. A recombinant host cell comprising the nucleic acid molecule of claim 12.

15. (canceled)

16. A library comprising of the olfactory receptor proteins of claim 1.

17. (canceled)

18. A method for identifying an olfactory receptor ligand, said method comprising:
a) providing the olfactory receptor protein of claim 1;
b) contacting said receptor with a test compound or composition; and
c) detecting activation of the olfactory receptor.

19. A method for identifying an olfactory receptor enhancer or antagonist, said method comprising:
a) providing the olfactory receptor protein of claim 1;
b) contacting said receptor with a cognate ligand and a test compound or composition; and
c) detecting increased or decreased activation of the olfactory receptor as compared to controls with ligand only.

20. The method according to claim 19, wherein the method is for identifying the olfactory receptor antagonist, and wherein the olfactory receptor is selected from the group consisting of OR52A5, OR52E8, OR56A1, OR56A3, OR56A4, OR52K1, OR51B2 (preferably OR51B2(C120R, L134F, C209S)), OR51B5, OR9Q2, OR7D4, OR2T4, OR2C1, OR2T11, OR2M2, OR2V1, OR5V1, OR4S2, and combinations thereof.

21. The method according to claim 19, wherein the method is for identifying the olfactory receptor antagonist, wherein the olfactory receptor is OR2M2 or OR2V1, and wherein step b) further comprises contacting said receptor.

22. The method according to claim 19, wherein the method is for identifying the olfactory receptor antagonist, wherein the olfactory receptor is OR51B2.

23. The method according to claim 19, wherein the method is for identifying the olfactory receptor antagonist, wherein the olfactory receptor is OR5V1.

24. A method for identifying an olfactory receptor that is capable of binding a target ligand, said method comprising:
a) providing the library of claim 16;
b) optionally, obtaining the olfactory receptor proteins from said library;
c) contacting the olfactory receptor proteins with the target ligand; and
d) identifying the olfactory receptor that is activated by the target ligand.

25. A method for generating an objective representation of the olfactory properties of a test compound or composition, said method comprising:
a) providing the library claim 16;
b) optionally, obtaining the olfactory receptor proteins from said library;
c) contacting the olfactory receptor proteins with the test compound or composition; and
d) detecting activation of each of the olfactory receptor proteins.

26. A method for assessing the difference or similarity between two or more test compounds or compositions, said method comprising:
a) providing the library of claim 16;
b) optionally, obtaining the olfactory receptor proteins from said library;
c) contacting the olfactory receptor proteins with each of the two or more test compounds or compositions;
d) detecting activation of each of the olfactory receptor proteins for each of the two or more test compounds or compositions; and
e) comparing the activated olfactory receptor proteins between each of the two or more test compounds or compositions.
